United States Patent Application Publication US 2025/0352577 A1 - sequence listing, part 3

SEQ ID NO: 25426 - protein, 1172 aa, Artificial Sequence
  Synthetic polypeptide
EQLPVLQAPFMAPVTFDDITVYLLQEEWVLLSQQQKELCGSNKLVAPLGPTVANPELFRKFGRGPEPWLGSVQGQRSLLEHHPGKKQMGYMGEMEVQGPTRESGQSLPPQKKAYLSHLSTGSGHIEGDWAGRNRKLLKPRSIQKSWFVQFPWLIMNEEQTALFCSACREYPSIRDKRSRLIEGYTGPFKVETLKYHAKSKAHMFCVNALAARDPIWAARFRSIRDPPGDVLASPEPLFTADCPIFYPPGPLGGFDSMAELLPSSRAELEDPGGDGAIPAMYLDCISDLRQKEITDGIHSSSDINILYNDAVESCIQDPSAEGLSEEVPVVFEELPVVFEDVAVYFTREEWGMLDKRQKELYRDVMRMNYELLASLGPAAAKPDLISKLERRAAPWIKDPNGPKWGKGRPPGNKKMVAVREADTQASAADSALLPGSPVEARASCCSSSICEEGDGPRRIKRTYRPRSIQRSWFGQFPWLVIDPKETKLFCSACIERPNLHDKSSRLVRGYTGPFKVETLKYHEVSKAHRLCVNTVEIKEDTPHTALVPEISSDLMANMEHFFNAAYSIAYHSRPLNDFEKILQLLQSTGTVILGKYRNRTACTQFIKYISETLKREILEDVRNSPCVSVLLDSSTDASEQACVGIYIRYFKQMEVKESYITLAPLYSETADGYFETIVSALDELDIPFRKPGWVVGLGTDGSAMLSCRGGLVEKFQEVIPQLLPVHCVAHRLHLAVVDACGSIDLVKKCDRHIRTVFKFYQSSNKRLNELQEGAAPLEQEIIRLKDLNAVRWVASRRRTLHALLVSWPALARHLQRVAEAGGQIGHRAKGMLKLMRGFHFVKFCHFLLDFLSIYRPLSEVCQKEIVLITEVNATLGRAYVALESLRHQAGPKEEEFNASFKDGRLHGICLDKLEVAEQRFQADRERTVLTGIEYLQQRFDADRPPQLKNMEVFDTMAWPSGIELASFGNDDILNLARYFECSLPTGYSEEALLEEWLGLKTIAQHLPFSMLCKNALAQHCRFPLLSKLMAVVVCVPISTSCCERGFKAMNRIRTDERTKLSNEVLNMLMMTAVNGVAVTEYDPQPAIQHWYLTSSGRRFSHVYTCAQVPARSPASARLRKEEMGALYVEEPRTQKPPILPSREAAEVLKDCIMEPPERLLYPHTSQEAPGMS

SEQ ID NO: 25427 - protein, 13 aa, Artificial Sequence
  Synthetic polypeptide
SNFQSCKLHSWLL

SEQ ID NO: 25428 - protein, 15 aa, Artificial Sequence
  Synthetic polypeptide
ATSSPASSIHGSCDV

SEQ ID NO: 25429 - protein, 139 aa, Artificial Sequence
  Synthetic polypeptide
NTYQCVTLCRVIITMLVATAVCCYLLCPALGMTVAPLSLTTPSSGPSPTQLCLVTSSLLLAPRDPDPQGLPGSWKSSQSSQPARALGSPGHSSGRGDVLLQYPHCSGVCPLSQGDAAGELVWVGSFPLQTGQMPGLSPS

SEQ ID NO: 25430 - protein, 139 aa, Artificial Sequence; identical to SEQ ID NO: 25429
  Synthetic polypeptide

SEQ ID NO: 25431 - protein, 4 aa, Artificial Sequence
  Synthetic polypeptide
HFVE

SEQ ID NO: 25432 - protein, 4 aa, Artificial Sequence
  Synthetic polypeptide
HFVE

SEQ ID NO: 25433 - protein, 4 aa, Artificial Sequence
  Synthetic polypeptide
HFVE

SEQ ID NO: 25434 - protein, 4 aa, Artificial Sequence
  Synthetic polypeptide
HFVE

SEQ ID NO: 25435 - protein, 4 aa, Artificial Sequence
  Synthetic polypeptide
HFVE

SEQ ID NO: 25436 - protein, 4 aa, Artificial Sequence
  Synthetic polypeptide
HFVE

SEQ ID NO: 25437 - protein, 4 aa, Artificial Sequence
  Synthetic polypeptide
HFVE

SEQ ID NO: 25438 - protein, 4 aa, Artificial Sequence
  Synthetic polypeptide
HFVE

SEQ ID NO: 25439 - protein, 56 aa, Artificial Sequence
  Synthetic polypeptide
NTYQCVTLCRVIITMLVATAVCCYLFWLIAILAQLNPLFGPQLKNETIWYVRFLWE

SEQ ID NO: 25440 - protein, 56 aa, Artificial Sequence; identical to SEQ ID NO: 25439
  Synthetic polypeptide

SEQ ID NO: 25441 - protein, 56 aa, Artificial Sequence; identical to SEQ ID NO: 25439
  Synthetic polypeptide

SEQ ID NO: 25442 - protein, 56 aa, Artificial Sequence; identical to SEQ ID NO: 25439
  Synthetic polypeptide

SEQ ID NO: 25443 - protein, 54 aa, Artificial Sequence
  Synthetic polypeptide
NTYQCVTLCRVIITMLVATAVCCYLFFQAAPYTHEITTLEICTWEFLLFMNAPR

SEQ ID NO: 25444 - protein, 162 aa, Artificial Sequence
  Synthetic polypeptide
NTYQCVTLCRVIITMLVATAVCCYLFWLIAILAQLNPLFGPQLKNETIWCPALGMTVAPLSLTTPSSGPSPTQLCLVTSSLLLAPRDPDPQGLPGSWKSSQSSQPARALGSPGHSSGRGDVLLQYPHCSGVCPLSQGDAAGELVWVGSFPLQTGQMPGLSPS

SEQ ID NO: 25445 - protein, 73 aa, Artificial Sequence
  Synthetic polypeptide
WQSRASLGAGVRLQTWFPARPSSAACGQVISALLAPHDFFHLSGTLMATAAPPSSGPWPTCGPSSGPTSLEPP

SEQ ID NO: 25446 - protein, 73 aa, Artificial Sequence; identical to SEQ ID NO: 25445
  Synthetic polypeptide

SEQ ID NO: 25447 - protein, 73 aa, Artificial Sequence; identical to SEQ ID NO: 25445
  Synthetic polypeptide

SEQ ID NO: 25448 - protein, 73 aa, Artificial Sequence; identical to SEQ ID NO: 25445
  Synthetic polypeptide

SEQ ID NO: 25449 - protein, 73 aa, Artificial Sequence; identical to SEQ ID NO: 25445
  Synthetic polypeptide

SEQ ID NO: 25450 - protein, 73 aa, Artificial Sequence; identical to SEQ ID NO: 25445
  Synthetic polypeptide

SEQ ID NO: 25451 - protein, 73 aa, Artificial Sequence; identical to SEQ ID NO: 25445
  Synthetic polypeptide

SEQ ID NO: 25452 - protein, 11 aa, Artificial Sequence
  Synthetic polypeptide
LHMIFFICQVL

SEQ ID NO: 25453 - protein, 11 aa, Artificial Sequence
  Synthetic polypeptide
LHMIFFICQVL

SEQ ID NO: 25454 - protein, 11 aa, Artificial Sequence
  Synthetic polypeptide
LHMIFFICQVL

SEQ ID NO: 25455 - protein, 11 aa, Artificial Sequence
  Synthetic polypeptide
LHMIFFICQVL

SEQ ID NO: 25456 - protein, 11 aa, Artificial Sequence
  Synthetic polypeptide
LHMIFFICQVL

SEQ ID NO: 25457 - protein, 11 aa, Artificial Sequence
  Synthetic polypeptide
LHMIFFICQVL

SEQ ID NO: 25458 - protein, 11 aa, Artificial Sequence
  Synthetic polypeptide
LHMIFFICQVL

SEQ ID NO: 25459 - protein, 11 aa, Artificial Sequence
  Synthetic polypeptide
LHMIFFICQVL

SEQ ID NO: 25460 - protein, 85 aa, Artificial Sequence
  Synthetic polypeptide
FFSSVRYSDGYRSSSLLRAVAHLRSQLWAHLPRAPLAPRWSPSAWCWVGGALLGPMVLSKHPHLCLVALCEAEEAPPASSTPHVV

SEQ ID NO: 25461 - protein, 692 aa, Artificial Sequence
  Synthetic polypeptide
FFSSVRYSDGYRSSSLLRAVAHLRSQLWAHLPRAPLAPRWSPSAWCWVGGALLGPMVLSKHPHLCLVALCEAEEAPPASSTPHVVGSRFNWKLFWQFLHPHLLVLGVAVVLALGAALVNVQIPLLLGQLVEVVAKYTRDHVGSFMTESQNLSTHLLILYGVQGLLTFGYLVLLSHVGERMAVDMRRALFSSLLRQDITFFDANKTGQLVSRLTTDVQEFKSSFKLVISQGLRSCTQVAGCLVSLSMLSTRLTLLLMVATPALMGVGTLMGSGLRKLSRQCQEQIARAMGVADEALGNVRTVRAFAMEQREEERYGAELEACRCRAEELGRGIALFQGLSNIAFNCMVLGTLFIGGSLVAGQQLTGGDLMSFLVASQTVQRSMANLSVLFGQVVRGLSAGARVFEYMALNPCIPLSGGCCVPKEQLRGSVTFQNVCFSYPCRPGFEVLKDFTLTLPPGKIVALVGQSGGGKTTVASLLERFYDPTAGVVMLDGRDLRTLDPSWLRGQVVGFISQEPVLFGTTIMENIRFGKLEASDEEVYTAAREANAHEFITSFPEGYNTVVGERGTTLSGGQKQRLAIARALIKQPTVLILDEATSALDAESERVVQEALDRASAGRTVLVIAHRLSTVRGAHCIVVMADGRVWEAGTHEELLKKGGLYAELIRRQALDAPRTAAPPPKKPEGPRSHQHKS

SEQ ID NO: 25462 - protein, 692 aa, Artificial Sequence; identical to SEQ ID NO: 25461
  Synthetic polypeptide

SEQ ID NO: 25463 - protein, 46 aa, Artificial Sequence
  Synthetic polypeptide
WQSRASLGAGVRLQTWFPARPSSAACGQVISALLAPHDFFHLSGTL

SEQ ID NO: 25464 - protein, 8 aa, Artificial Sequence
  Synthetic polypeptide
FFSSVRYS

SEQ ID NO: 25465 - protein, 404 aa, Artificial Sequence
  Synthetic polypeptide
FFSSVRYSDGYRSSSLLRAVAHLRSQLWAHLPRAPLAPRWSPSAWCWVGGALLGPMVLSKHPHLCLVALCEAEEAPPASSTPHVVGSRFNWKLFWQFLHPHLLVLGVAVVLALGAALVNVQIPLLLGQLVEVVAKYTRDHVGSFMTESQNLSTHLLILYGVQGLLTFGYLVLLSHVGERMAVDMRRALFSSLLRQDITFFDANKTGQLVSRLTTDVQEFKSSFKLVISQGLRSCTQVAGCLVSLSMLSTRLTLLLMVATPALMGVGTLMGSGLRKLSRQCQEQIARAMGVADEALGNVRTVRAFAMEQREEERYGAELEACRCRAEELGRGIALFQGLSNIAFNCMVLGTLFIGGSLVAGQQLTGGDLMSFLVASQTVQRQVHGQPLCPVWAGGPGAECRCPGL

SEQ ID NO: 25466 - protein, 667 aa, Artificial Sequence
  Synthetic polypeptide
FFSSVRYSDGYRSSSLLRAVAHLRSQLWAHLPRAPLAPRWSPSAWCWVGGALLGPMVLSKHPHLCLVALCEAEEAPPASSTPHVVGSRFNWKLFWQFLHPHLLVLGVAVVLALGAALVNVQIPLLLGQLVEVVAKYTRDHVGSFMTESQNLSTHLLILYGVQGLLTFGYLVLLSHVGERMAVDMRRALFSSLLRQDITFFDANKTGQLVSRLTTDVQEFKSSFKLVISQGLRSCTQVAGCLVSLSMLSTRLTLLLMVATPALMGVGTLMGSGLRKLSRQCQEQIARAMGVADEALGNVRTVRAFAMEQREEERYGAELEACRCRAEELGRGIALFQGLSNIAFNCMVLGTLFIGGSLVAGQQLTGGDLMSFLVASQTVQRSMANLSVLFGQVVRGLSAGARVFEYMALNPCIPLSGGCCVPKEQLRGSVTFQNVCFSYPCRPGFEVLKDFTLTLPPGKIVALVGQSGGGKTTVASLLERFYDPTAGVVMLDGRDLRTLDPSWLRGQVVGFISQEPVLFGTTIMENIRFGKLEASDEEVYTAAREANAHEFITSFPEGYNTVVGERGTTLSGGQKQRLAIARALIKQPTVLILDEATSALDAESERVVQEALDRASAGRTVLAGTHEELLKKGGLYAELIRRQALDAPRTAAPPPKKPEGPRSHQHKS

SEQ ID NO: 25467 - protein, 383 aa, Artificial Sequence
  Synthetic polypeptide
FFSSVRYSDGYRSSSLLRAVAHLRSQLWAHLPRAPLAPRWSPSAWCWVGGALLGPMVLSKHPHLCLVALCEAEEAPPASSTPHVVGSRFNWKLFWQFLHPHLLVLGVAVVLALGAALVNVQIPLLLGQLVEVVAKYTRDHVGSFMTESQNLSTHLLILYGVQGLLTFGYLVLLSHVGERMAVDMRRALFSSLLRQDITFFDANKTGQLVSRLTTDVQEFKSSFKLVISQGLRSCTQVAGCLVSLSMLSTRLTLLLMVATPALMGVGTLMGSGLRKLSRQCQEQIARAMGVADEALGNVRTVRAFAMEQREEERYGAELEACRCRAEELGRGIALFQGLSNIAFNCMVLGTLFIGGSLVAGQQLTGGDLMSFLVASQTVQRDVL

SEQ ID NO: 25468 - protein, 405 aa, Artificial Sequence
  Synthetic polypeptide
FFSSVRYSDGYRSSSLLRAVAHLRSQLWAHLPRAPLAPRWSPSAWCWVGGALLGPMVLSKHPHLCLVALCEAEEAPPASSTPHVVGSRFNWKLFWQFLHPHLLVLGVAVVLALGAALVNVQIPLLLGQLVEVVAKYTRDHVGSFMTESQNLSTHLLILYGVQGLLTFGYLVLLSHVGERMAVDMRRALFSSLLRQDITFFDANKTGQLVSRLTTDVQEFKSSFKLVISQGLRSCTQVAGCLVSLSMLSTRLTLLLMVATPALMGVGTLMGSGLRKLSRQCQEQIARAMGVADEALGNVRTVRAFAMEQREEERYGAELEACRCRAEELGRGIALFQGLSNIAFNCMVLGTLFIGGSLVAGQQLTGGDLMSFLVASQTVQSFLRVAPCPNSLPLQAVTFHAWKDHP

SEQ ID NO: 25469 - protein, 27 aa, Artificial Sequence
  Synthetic polypeptide
NEVVQKLVLPFGRLNYLPLEQQFMPCL

SEQ ID NO: 25470 - protein, 28 aa, Artificial Sequence
  Synthetic polypeptide
LNPFAALGLRFSTGEMRWYRSWSCPLGD

SEQ ID NO: 25471 - protein, 28 aa, Artificial Sequence
  Synthetic polypeptide
LNPFAALGLRFSTGEMRWYRSWSCPLGD

SEQ ID NO: 25472 - protein, 28 aa, Artificial Sequence
  Synthetic polypeptide
LNPFAALGLRFSTGEMRWYRSWSCPLGD

SEQ ID NO: 25473 - protein, 28 aa, Artificial Sequence
  Synthetic polypeptide
LNPFAALGLRFSTGEMRWYRSWSCPLGD

SEQ ID NO: 25474 - protein, 276 aa, Artificial Sequence
  Synthetic polypeptide
NEVVQKLVLPFGRLNYLPLEQQFMPCLERILAREAGVAPLATVNILMSLCQLRCLPFRALHFVFSPGFINYISGTPHALIVRRYLSLLDTAVELELPGYRGPRLPRRQQVPIFPQPLITDRARCKYSHKDIVAEGLRQLLGEEKYRQDLTVPPGYCTDFLLCASSSGAVLPVRTQDPFLPYPPRSCPQGQAASSATTRDPAQRVVLVLRERWHFCRDGRVLLGSRALRERHLGLMGYQLLPLPFEELESQRGLPQLKSYLRQKLQALGLRWGPEGG

SEQ ID NO: 25475 - protein, 276 aa, Artificial Sequence; identical to SEQ ID NO: 25474
  Synthetic polypeptide

SEQ ID NO: 25476 - protein, 276 aa, Artificial Sequence; identical to SEQ ID NO: 25474
  Synthetic polypeptide

SEQ ID NO: 25477 - protein, 18 aa, Artificial Sequence
  Synthetic polypeptide
DPQVLVLSLDSGFLIVPG

SEQ ID NO: 25478 - protein, 18 aa, Artificial Sequence
  Synthetic polypeptide
DPQVLVLSLDSGFLIVPG

SEQ ID NO: 25479 - protein, 18 aa, Artificial Sequence
  Synthetic polypeptide
DPQVLVLSLDSGFLIVPG

SEQ ID NO: 25480 - protein, 6 aa, Artificial Sequence
  Synthetic polypeptide
VWTLDF

SEQ ID NO: 25481 - protein, 6 aa, Artificial Sequence
  Synthetic polypeptide
VWTLDF

SEQ ID NO: 25482 - protein, 6 aa, Artificial Sequence
  Synthetic polypeptide
VWTLDF

SEQ ID NO: 25483 - protein, 185 aa, Artificial Sequence
  Synthetic polypeptide
MELGSPGSSPESGLWIFDCPRLKFSEIPQRLTALLLPPDPIVINHVISVDPSDQKKTACYDIDVEVEEPLKGQMSSFLLSTANQQEISALDSKIHETIESINQLKIQRDFMLSFSRDPKGYVQDLLRSQSRDLKVMTDVAGNPEEERRAEFYHQPWSQEAVSRYFYCKIQQRRQELEQSLVVRNT

SEQ ID NO: 25484 - protein, 185 aa, Artificial Sequence; identical to SEQ ID NO: 25483
  Synthetic polypeptide

SEQ ID NO: 25485 - protein, 185 aa, Artificial Sequence; identical to SEQ ID NO: 25483
  Synthetic polypeptide

SEQ ID NO: 25486 - protein, 57 aa, Artificial Sequence
  Synthetic polypeptide
PLASARRTFPPRNLRGLQLHGPVPGVPGGQPLPPEQGLGQELCEHHQGVRGRSSMEP

SEQ ID NO: 25487 - protein, 98 aa, Artificial Sequence
  Synthetic polypeptide
CDRWPLHGEHFRLEIFEGCNFTGQCLEFLEDSPFLQSRGWVKNCVNTIKVYGDGAAWSPRSFGAEDFQLSSSLQSDQGPEEATTKPATTQPPFLTANL

SEQ ID NO: 25488 - protein, 12 aa, Artificial Sequence
  Synthetic polypeptide
VTAGLCTENISA

SEQ ID NO: 25489 - protein, 448 aa, Artificial Sequence
  Synthetic polypeptide
SRLGGCCWHRIIQAHGGTVDPTFTSRCTHLLCESQVSSAYAQAIRERKRCVTAHWLNTVLKKKKMVPPHRALHFPVAFPPGGKPCSQHIISVTGFVDSDRDDLKLMAYLAGAKYTGYLCRSNTVLICKEPTGLKYEKAKEWRIPCVNAQWLGDILLGNFEALRQIQYSRYTAFSLQDPFAPTQHLVLNLLDAWRVPLKVSAELLMSIRLPPKLKQNEVANVQPSSKRARIEDVPPPTKKLTPELTPFVLFTGFEPVQVQQYIKKLYILGGEVAESAQKCTHLIASKVTRTVKFLTAISVVKHIVTPEWLEECFRCQKFIDEQNYILRDAEAEVLFSFSLEESLKRAHVSPLFKAKYFYITPGICPSLSTMKAIVECAGGKVLSKQPSFRKLMEHKQNSSLSEIILISCENDLHLCREYFARGIDVHNAEFVLTGVLTQTLDYESYKFN

SEQ ID NO: 25490 - protein, 448 aa, Artificial Sequence; identical to SEQ ID NO: 25489
  Synthetic polypeptide

SEQ ID NO: 25491 - protein, 7 aa, Artificial Sequence
  Synthetic polypeptide
GAAAGIG

SEQ ID NO: 25492 - protein, 7 aa, Artificial Sequence
  Synthetic polypeptide
GAAAGIG

SEQ ID NO: 25493 - protein, 20 aa, Artificial Sequence
  Synthetic polypeptide
GWAWWLASVIPTLWEAKISL

SEQ ID NO: 25494 - protein, 20 aa, Artificial Sequence
  Synthetic polypeptide
GWAWWLASVIPTLWEAKISL

SEQ ID NO: 25495 - protein, 20 aa, Artificial Sequence
  Synthetic polypeptide
GWAWWLASVIPTLWEAKISL

SEQ ID NO: 25496 - protein, 20 aa, Artificial Sequence
  Synthetic polypeptide
GWAWWLASVIPTLWEAKISL

SEQ ID NO: 25497 - protein, 20 aa, Artificial Sequence
  Synthetic polypeptide
GWAWWLASVIPTLWEAKISL

SEQ ID NO: 25498 - protein, 24 aa, Artificial Sequence
  Synthetic polypeptide
SQHYGRLRFLYESSSRTLGELLNS

SEQ ID NO: 25499 - protein, 24 aa, Artificial Sequence
  Synthetic polypeptide
SQHYGRLRFLYESSSRTLGELLNS

SEQ ID NO: 25500 - protein, 24 aa, Artificial Sequence
  Synthetic polypeptide
SQHYGRLRFLYESSSRTLGELLNS

SEQ ID NO: 25501 - protein, 24 aa, Artificial Sequence
  Synthetic polypeptide
SQHYGRLRFLYESSSRTLGELLNS

SEQ ID NO: 25502 - protein, 24 aa, Artificial Sequence
  Synthetic polypeptide
SQHYGRLRFLYESSSRTLGELLNS

SEQ ID NO: 25503 - protein, 31 aa, Artificial Sequence
  Synthetic polypeptide
SGQWLSLPSYHSPLAFFTLSSLAFVLFLPQL

SEQ ID NO: 25504 - protein, 31 aa, Artificial Sequence; identical to SEQ ID NO: 25503
  Synthetic polypeptide

SEQ ID NO: 25505 - protein, 31 aa, Artificial Sequence; identical to SEQ ID NO: 25503
  Synthetic polypeptide

SEQ ID NO: 25506 - protein, 31 aa, Artificial Sequence; identical to SEQ ID NO: 25503
  Synthetic polypeptide

SEQ ID NO: 25507 - protein, 31 aa, Artificial Sequence; identical to SEQ ID NO: 25503
  Synthetic polypeptide

SEQ ID NO: 25508 - protein, 38 aa, Artificial Sequence
  Synthetic polypeptide
HDQANGYLSLPTTLLLLSSLSPAWPSCCSSHSFKESVC

SEQ ID NO: 25509 - protein, 38 aa, Artificial Sequence; identical to SEQ ID NO: 25508
  Synthetic polypeptide

SEQ ID NO: 25510 - protein, 38 aa, Artificial Sequence; identical to SEQ ID NO: 25508
  Synthetic polypeptide

SEQ ID NO: 25511 - protein, 38 aa, Artificial Sequence; identical to SEQ ID NO: 25508
  Synthetic polypeptide

SEQ ID NO: 25512 - protein, 38 aa, Artificial Sequence; identical to SEQ ID NO: 25508
  Synthetic polypeptide

SEQ ID NO: 25513 - protein, 149 aa, Artificial Sequence
  Synthetic polypeptide
IRFHHSRAQVASYHRTKSKFLITTYEADMIRPMAISPFLPLSSCFLHSLQPGLRAVPPTALKKVFAENKEIQKLAEQFVLLNLVYETTDKHLSPDGQYVPRIMFVDPSLTVRADITGRYSNRLYAYEPADTALLLDNMKKALKLLKTEL

SEQ ID NO: 25514 - protein, 149 aa, Artificial Sequence; identical to SEQ ID NO: 25513
  Synthetic polypeptide

SEQ ID NO: 25515 - protein, 163 aa, Artificial Sequence
  Synthetic polypeptide
IRFHHSRAQVASYHRTKSKFLITTYEADMIRPMAISPFLPLSSCFLHSLQPGLRAVPPTALKKVFAENKEIQKLAEQFVLLNLVYETTDKHLSPDGQYVPRIMFVDPSLTVRADITGRYSNRLYAYEPADTALCKCDLQFGCCPRVEHLYCCSDGTRGCMVSA

SEQ ID NO: 25516 - protein, 162 aa, Artificial Sequence
  Synthetic polypeptide
IRFHHSRAQVASYHRTKSKFLITTYEADMIRPMAISPFLPLSSCFLHSLQPGLRAVPPTALKKVFAENKEIQKLAEQFVLLNLVYETTDKHLSPDGQYVPRIMFVDPSLTVRADITGRYSNRLYAYEPADTALCKCDLQFGCCPRVEHLYCCSDGTRGCMVR

SEQ ID NO: 25517 - protein, 105 aa, Artificial Sequence
  Synthetic polypeptide
IRFHHSRAQVASYHRTKSKFLITTYEADMIRPMAISPFLPLSSCFLHSLQPGLRAVPPTALKKVFAENKEIQKLAEQFVLLNLVYETTDKHLSPDGQYVPRIMFV

SEQ ID NO: 25518 - protein, 10 aa, Artificial Sequence
  Synthetic polypeptide
KVYVFNRMGR

SEQ ID NO: 25519 - protein, 10 aa, Artificial Sequence
  Synthetic polypeptide
KVYVFNRMGR

SEQ ID NO: 25520 - protein, 10 aa, Artificial Sequence
  Synthetic polypeptide
KVYVFNRMGR

SEQ ID NO: 25521 - protein, 136 aa, Artificial Sequence
  Synthetic polypeptide
KYTFSIGWGDDITWVQTYEEGLFYAQKSKKPLMVIHHLEDCQYSQALKKVFAQNEEIQEMAQNKFIMLNLMHETTDKNLSPDGQYVPRIMFVDPSLTVRADIAGRYSNRLYTYEPRDLPLLIENMKKALRLIQSEL

SEQ ID NO: 25522 - protein, 133 aa, Artificial Sequence
  Synthetic polypeptide
KYTFSIGWGDDITWVQTYEEGLFYAQKSKKPLMVIHHLEDCQYSQALKKVFAQNEEIQEMAQNKFIMLNLMHETTDKNLSPDGQYVPRIMFVDPSLTVRADIAGRYSNRLYTYEPRDLPLCKYSQMISNSGHS

SEQ ID NO: 25523 - protein, 120 aa, Artificial Sequence
  Synthetic polypeptide
KYTFSIGWGDDITWVQTYEEGLFYAQKSKKPLMVIHHLEDCQYSQALKKVFAQNEEIQEMAQNKFIMLNLMHETTDKNLSPDGQYVPRIMFVDPSLTVRADIAGRYSNRLYTYEPRDLPL

SEQ ID NO: 25524 - protein, 43 aa, Artificial Sequence
  Synthetic polypeptide
LTLVIPALWEAEAVGSFEDGEMTSLGYKLMKKVSFMLKKVRSH

SEQ ID NO: 25525 - protein, 43 aa, Artificial Sequence; identical to SEQ ID NO: 25524
  Synthetic polypeptide

SEQ ID NO: 25526 - protein, 43 aa, Artificial Sequence; identical to SEQ ID NO: 25524
  Synthetic polypeptide

SEQ ID NO: 25527 - protein, 17 aa, Artificial Sequence
  Synthetic polypeptide
SQHFGRPKQLDHLRMGR

SEQ ID NO: 25528 - protein, 17 aa, Artificial Sequence
  Synthetic polypeptide
SQHFGRPKQLDHLRMGR

SEQ ID NO: 25529 - protein, 17 aa, Artificial Sequence
  Synthetic polypeptide
SQHFGRPKQLDHLRMGR

SEQ ID NO: 25530 - protein, 26 aa, Artificial Sequence
  Synthetic polypeptide
CLPGGSEDQMRSGTVCGPSWGPTTAS

SEQ ID NO: 25531 - protein, 26 aa, Artificial Sequence
  Synthetic polypeptide
CLPGGSEDQMRSGTVCGPSWGPTTAS

SEQ ID NO: 25532 - protein, 26 aa, Artificial Sequence
  Synthetic polypeptide
CLPGGSEDQMRSGTVCGPSWGPTTAS

SEQ ID NO: 25533 - protein, 26 aa, Artificial Sequence
  Synthetic polypeptide
CLPGGSEDQMRSGTVCGPSWGPTTAS

SEQ ID NO: 25534 - protein, 26 aa, Artificial Sequence
  Synthetic polypeptide
CLPGGSEDQMRSGTVCGPSWGPTTAS

SEQ ID NO: 25535 - protein, 316 aa, Artificial Sequence
  Synthetic polypeptide
RSNEERDGMRAILGSYDSELTPAEYSPQLTRRMREAEDMVQKVHSHSAEMEAQLSQALEELGGQKQRADMLEMELKMLKSQSSSAEQSFLFSREEADTLRLKVEELEGERSRLEEEKRMLEAQLERRALQGDYDQSRTKVLHMSLNPTSVARQRLREDHSQLQAECERLRGLLRAMERGGTVPADLEAAAASLPSSKEVAELKKQVESAELKNQRLKEVFQTKIQEFRKACYTLTGYQIDITTENQYRLTSLYAEHPGDCLIFKATSPSGSKMQLLETEFSHTVGELIEVHLRRQDSIPAFLSSLTLELFSRQTVA

SEQ ID NO: 25536 - protein, 316 aa, Artificial Sequence; identical to SEQ ID NO: 25535
  Synthetic polypeptide

SEQ ID NO: 25537 - protein, 316 aa, Artificial Sequence; identical to SEQ ID NO: 25535
  Synthetic polypeptide

SEQ ID NO: 25538 - protein, 316 aa, Artificial Sequence; identical to SEQ ID NO: 25535
  Synthetic polypeptide

SEQ ID NO: 25539 - protein, 130 aa, Artificial Sequence
  Synthetic polypeptide
RSNEERDGMRAILGSYDSELTPAEYSPQLTRRMREAEDMVQKVHSHSAEMEAQLSQALEELGGQKQRADMLEMELKMLKSQSSSAEQSFLFSREEADTLRLKVEELEGERSRLEEEKRMLEAQLERRALQ

SEQ ID NO: 25540 - protein, 7 aa, Artificial Sequence
  Synthetic polypeptide
DQVFSLV

SEQ ID NO: 25541 - protein, 13 aa, Artificial Sequence
  Synthetic polypeptide
MLLGLLAKIKCFL

SEQ ID NO: 25542 - protein, 940 aa, Artificial Sequence
  Synthetic polypeptide
CFSAFWLRSSVFFSVIHSSYCIGAAVPHFETFAIARGAAFHIFQVIDKKPSIDNFSTAGYKPESIEGTVEFKNVSFNYPSRPSIKILKGLNLRIKSGETVALVGLNGSGKSTVVQLLQRLYDPDDGFIMVDENDIRALNVRHYRDHIGVVSQEPVLFGTTISNNIKYGRDDVTDEEMERAAREANAYDFIMEFPNKFNTLVGEKGAQMSGGQKQRIAIARALVRNPKILILDEATSALDSESKSAVQAALEKASKGRTTIVVAHRLSTIRSADLIVTLKDGMLAEKGAHAELMAKRGLYYSLVMSQDIKKADEQMESMTYSTERKTNSLPLHSVKSIKSDFIDKAEESTQSKEISLPEVSLLKILKLNKPEWPFVVLGTLASVLNGTVHPVFSIIFAKIITMFGNNDKTTLKHDAEIYSMIFVILGVICFVSYFMQGLFYGRAGEILTMRLRHLAFKAMLYQDIAWFDEKENSTGGLTTILAIDIAQIQGATGSRIGVLTQNATNMGLSVIISFIYGWEMTFLILSIAPVLAVTGMIETAAMTGFANKDKQELKHAGKIATEALENIRTIVSLTREKAFEQMYEEMLQTQHRNTSKKAQIIGSCYAFSHAFIYFAYAAGFRFGAYLIQAGRMTPEGMFIVFTAIAYGAMAIGETLVLAPEYSKAKSGAAHLFALLEKKPNIDSRSQEGKKPDTCEGNLEFREVSFFYPCRPDVFILRGLSLSIERGKTVAFVGSSGCGKSTSVQLLQRLYDPVQGQVLFDGVDAKELNVQWLRSQIAIVPQEPVLFNCSIAENIAYGDNSRVVPLDEIKEAANAANIHSFIEGLPEKYNTQVGLKGAQLSGGQKQRLAIARALLQKPKILLLDEATSALDNDSEKVVQHALDKARTGRTCLVVTHRLSAIQNADLIVVLHNGKIKEQGTHQELLRNRDIYFKLVNAQSVQ

SEQ ID NO: 25543 - protein, 36 aa, Artificial Sequence
  Synthetic polypeptide
DVGSTSAPPPCLGCEERLCWAATLSGRRAKVGLQSW

SEQ ID NO: 25544 - protein, 36 aa, Artificial Sequence; identical to SEQ ID NO: 25543
  Synthetic polypeptide

SEQ ID NO: 25545 - protein, 75 aa, Artificial Sequence
  Synthetic polypeptide
GASLPGRPSSEMWGAPLPRRPVWDVRSASAGPQPCLGGEQRSDYNRGSTPTFYYSKCRFDCDPKGWNAGGERSTC

SEQ ID NO: 25546 - protein, 75 aa, Artificial Sequence; identical to SEQ ID NO: 25545
  Synthetic polypeptide

SEQ ID NO: 25547 - protein, 700 aa, Artificial Sequence
  Synthetic polypeptide
GAPLLGRNPVWEASKGRTTIVVAHRLSTIRSADLIVTLKDGMLAEKGAHAELMAKRGLYYSLVMSQDIKKADEQMESMTYSTERKTNSLPLHSVKSIKSDFIDKAEESTQSKEISLPEVSLLKILKLNKPEWPFVVLGTLASVLNGTVHPVFSIIFAKIITMFGNNDKTTLKHDAEIYSMIFVILGVICFVSYFMQGLFYGRAGEILTMRLRHLAFKAMLYQDIAWFDEKENSTGGLTTILAIDIAQIQGATGSRIGVLTQNATNMGLSVIISFIYGWEMTFLILSIAPVLAVTGMIETAAMTGFANKDKQELKHAGKIATEALENIRTIVSLTREKAFEQMYEEMLQTQHRNTSKKAQIIGSCYAFSHAFIYFAYAAGFRFGAYLIQAGRMTPEGMFIVFTAIAYGAMAIGETLVLAPEYSKAKSGAAHLFALLEKKPNIDSRSQEGKKPDTCEGNLEFREVSFFYPCRPDVFILRGLSLSIERGKTVAFVGSSGCGKSTSVQLLQRLYDPVQGQVLFDGVDAKELNVQWLRSQIAIVPQEPVLFNCSIAENIAYGDNSRVVPLDEIKEAANAANIHSFIEGLPEKYNTQVGLKGAQLSGGQKQRLAIARALLQKPKILLLDEATSALDNDSEKVVQHALDKARTGRTCLVVTHRLSAIQNADLIVVLHNGKIKEQGTHQELLRNRDIYFKLVNAQSVQ

SEQ ID NO: 25548 - protein, 700 aa, Artificial Sequence; identical to SEQ ID NO: 25547
  Synthetic polypeptide

SEQ ID NO: 25549 - protein, 8 aa, Artificial Sequence
  Synthetic polypeptide
MVLFLPDP

SEQ ID NO: 25550 - protein, 8 aa, Artificial Sequence
  Synthetic polypeptide
MVLFLPDP

SEQ ID NO: 25551 - protein, 452 aa, Artificial Sequence
  Synthetic polypeptide
WFFSFQIPKEVADIFNAPSDDEEFVGFRDDVPMETLSSEESCDSFDSLESGKQQDVRFHSKYFTEELRRIFIEDTDSETEDFAGFTQSDLNGKTNPEVMVVESDLSDDGKASLVSEEEEDEEEDKATPRRSRSRRSSIGLRVAFQFPTKKLANKPDKNSSSEQLFSSARLQNEKKTILERKKDCRQVIQREDSTSESEDDSRDESQESSDALLKRTMNIKENKAMLAQLLAELNSMPDFFPVRTPTSASRKKTVRRAFSEGQITRRMNPTRSARPPEKFALENFTVSAAKFAEEFYSFRRRKTIGGKCREYRRRHRISSFRPVEDITEEDLENVAITVRDKIYDKVLGNTCHQCRQKTIDTKTVCRNQGCCGVRGQFCGPCLRNRYGEDVRSALLDPDWVCPPCRGICNCSYCRKRDGRCATGILIHLAKFYGYDNVKEYLESLQKELVEDN

SEQ ID NO: 25552 - protein, 47 aa, Artificial Sequence
  Synthetic polypeptide
GSFPSRSLKKWLTSLTPPVMMKSLLASEMMFPWKPSRQRRAAIVLTH

SEQ ID NO: 25553 - protein, 47 aa, Artificial Sequence; identical to SEQ ID NO: 25552
  Synthetic polypeptide

SEQ ID NO: 25554 - protein, 406 aa, Artificial Sequence
  Synthetic polypeptide
WFFSFQIPKEVADIFNAPSDDEEFVGFRDDVPMETLSSEESCDSFDSLESGKQVVESDLSDDGKASLVSEEEEDEEEDKATPRRSRSRRSSIGLRVAFQFPTKKLANKPDKNSSSEQLFSSARLQNEKKTILERKKDCRQVIQREDSTSESEDDSRDESQESSDALLKRTMNIKENKAMLAQLLAELNSMPDFFPVRTPTSASRKKTVRRAFSEGQITRRMNPTRSARPPEKFALENFTVSAAKFAEEFYSFRRRKTIGGKCREYRRRHRISSFRPVEDITEEDLENVAITVRDKIYDKVLGNTCHQCRQKTIDTKTVCRNQGCCGVRGQFCGPCLRNRYGEDVRSALLDPDWVCPPCRGICNCSYCRKRDGRCATGILIHLAKFYGYDNVKEYLESLQKELVEDN

SEQ ID NO: 25555 - protein, 36 aa, Artificial Sequence
  Synthetic polypeptide
WWYLRGGRGVVGAQSHGLLFHPEKSQDSRRPFQIRG

SEQ ID NO: 25556 - protein, 36 aa, Artificial Sequence; identical to SEQ ID NO: 25555
  Synthetic polypeptide

SEQ ID NO: 25557 - protein, 36 aa, Artificial Sequence; identical to SEQ ID NO: 25555
  Synthetic polypeptide

SEQ ID NO: 25558 - protein, 36 aa, Artificial Sequence; identical to SEQ ID NO: 25555
  Synthetic polypeptide

SEQ ID NO: 25559 - protein, 419 aa, Artificial Sequence
  Synthetic polypeptide
SCGDGGTCGAAEGWWEHRAMASSSILRSHRTPEDLSRFVVELQQRELALKDKNSAVTSSARGLEKARQQLQEELRQVSGQLLEERKKRETHEALARRLQKRVLLLTKERDGMRAILGSYDSELTPAEYSPQLTRRMREAEDMVQKVHSHSAEMEAQLSQALEELGGQKQRADMLEMELKMLKSQSSSAEQSFLFSREEADTLRLKVEELEGERSRLEEEKRMLEAQLERRALQGDYDQSRTKVLHMSLNPTSVARQRLREDHSQLQAECERLRGLLRAMERGGTVPADLEAAAASLPSSKEVAELKKQVESAELKNQRLKEVFQTKIQEFRKACYTLTGYQIDITTENQYRLTSLYAEHPGDCLIFKATSPSGSKMQLLETEFSHTVGELIEVHLRRQDSIPAFLSSLTLELFSRQTVA

SEQ ID NO: 25560 - protein, 419 aa, Artificial Sequence; identical to SEQ ID NO: 25559
  Synthetic polypeptide

SEQ ID NO: 25561 - protein, 419 aa, Artificial Sequence; identical to SEQ ID NO: 25559
  Synthetic polypeptide

SEQ ID NO: 25562 - protein, 419 aa, Artificial Sequence; identical to SEQ ID NO: 25559
  Synthetic polypeptide

SEQ ID NO: 25563 - protein, 22 aa, Artificial Sequence
  Synthetic polypeptide
EVTGLQKTFPDSWLSCSRGSLP

SEQ ID NO: 25564 - protein, 22 aa, Artificial Sequence
  Synthetic polypeptide
EVTGLQKTFPDSWLSCSRGSLP

SEQ ID NO: 25565 - protein, 22 aa, Artificial Sequence
  Synthetic polypeptide
EVTGLQKTFPDSWLSCSRGSLP

SEQ ID NO: 25566 - protein, 22 aa, Artificial Sequence
  Synthetic polypeptide
EVTGLQKTFPDSWLSCSRGSLP

SEQ ID NO: 25567 - protein, 38 aa, Artificial Sequence
  Synthetic polypeptide
PSSFPSKGWCELQFLLLAKHLKKISVFLVHGRINFLTL

SEQ ID NO: 25568 - protein, 14 aa, Artificial Sequence
  Synthetic polypeptide
RKSQCSWYMVGSTS

SEQ ID NO: 25569 - protein, 20 aa, Artificial Sequence
  Synthetic polypeptide
VAVSSPCKTSEENLSVPGTW

SEQ ID NO: 25570 - protein, 33 aa, Artificial Sequence
  Synthetic polypeptide
GQEFETSLGNMVKPPSLQKISQIPALLLASCLG

SEQ ID NO: 25571 - protein, 33 aa, Artificial Sequence; identical to SEQ ID NO: 25570
  Synthetic polypeptide

SEQ ID NO: 25572 - protein, 33 aa, Artificial Sequence; identical to SEQ ID NO: 25570
  Synthetic polypeptide

SEQ ID NO: 25573 - protein, 38 aa, Artificial Sequence
  Synthetic polypeptide
NPRLYKKLARSQLSCWLRAWGRSSSHIPPGRSNFSVPC

SEQ ID NO: 25574 - protein, 38 aa, Artificial Sequence; identical to SEQ ID NO: 25573
  Synthetic polypeptide

SEQ ID NO: 25575 - protein, 148 aa, Artificial Sequence
  Synthetic polypeptide
PDPSSPVGFVLGVDLLHIFPLEGATFLCPADVTDPRTSQRILEVLPGRRADVILSDMAPNATGFRDLDHDRLISLCLTLLSVTPDILQPGGTFLCKTWAGSQSRRLQRRLTEEFQNVRIIKPEASRKESSEVYFLATQYHGRKGTVKQ

SEQ ID NO: 25576 - protein, 148 aa, Artificial Sequence; identical to SEQ ID NO: 25575
  Synthetic polypeptide

SEQ ID NO: 25577 - protein, 21 aa, Artificial Sequence
  Synthetic polypeptide
NPRLYKKLARSQLSCWLRAWG

SEQ ID NO: 25578 - protein, 13 aa, Artificial Sequence
  Synthetic polypeptide
PDPSSPVGFVLGV

SEQ ID NO: 25579 - protein, 27 aa, Artificial Sequence
  Synthetic polypeptide
DQPGQHGFKRGADPGMPEPTVLSLLWG

SEQ ID NO: 25580 - protein, 27 aa, Artificial Sequence
  Synthetic polypeptide
DQPGQHGFKRGADPGMPEPTVLSLLWG

SEQ ID NO: 25581 - protein, 26 aa, Artificial Sequence
  Synthetic polypeptide
GQEFETSLANMDLRGVQIPECLNQLF

SEQ ID NO: 25582 - protein, 26 aa, Artificial Sequence
  Synthetic polypeptide
GQEFETSLANMDLRGVQIPECLNQLF

SEQ ID NO: 25583 - protein, 26 aa, Artificial Sequence
  Synthetic polypeptide
GQEFETSLANMDLRGVQIPECLNQLF

SEQ ID NO: 25584 - protein, 31 aa, Artificial Sequence
  Synthetic polypeptide
WFTPVIPALWKVEAGGSFEVRSLRPAWPTWI

SEQ ID NO: 25585 - protein, 31 aa, Artificial Sequence; identical to SEQ ID NO: 25584
  Synthetic polypeptide

SEQ ID NO: 25586 - protein, 31 aa, Artificial Sequence; identical to SEQ ID NO: 25584
  Synthetic polypeptide

SEQ ID NO: 25587 - protein, 97 aa, Artificial Sequence
  Synthetic polypeptide
DQPGQHGFKRGADPGMPEPTVLRVWWLTPVISALWKAKVGRSWEDCLKLGVQDQPGQRSETHLYQKKKTYFGDKGLFGLLDLEAISGQHGRCVLWLG

SEQ ID NO: 25588 - protein, 123 aa, Artificial Sequence
  Synthetic polypeptide
QDPVSTEKHTHRKISRAWELQEESGLTVDALHKVGQIVFEFVGEPELMDVHVFCTDSIQGTPVESDEMRPCWFQLDQIPFKDMWPDDSYWFPLLLQKKKFHGYFKFQGQDTILDYTLREVDTV

SEQ ID NO: 25589 - protein, 123 aa, Artificial Sequence; identical to SEQ ID NO: 25588
  Synthetic polypeptide

SEQ ID NO: 25590 - protein, 123 aa, Artificial Sequence; identical to SEQ ID NO: 25588
  Synthetic polypeptide

SEQ ID NO: 25591 - protein, 123 aa, Artificial Sequence; identical to SEQ ID NO: 25588
  Synthetic polypeptide

SEQ ID NO: 25592 - protein, 123 aa, Artificial Sequence; identical to SEQ ID NO: 25588
  Synthetic polypeptide

SEQ ID NO: 25593 - protein, 123 aa, Artificial Sequence; identical to SEQ ID NO: 25588
  Synthetic polypeptide

SEQ ID NO: 25594 - protein, 59 aa, Artificial Sequence
  Synthetic polypeptide
TRHGGSHLKSQHFGRPKQKDRLSPGVQDQPGQHSKTLSLQKNTHTEKLAGHGSCRRRAV

SEQ ID NO: 25595 - protein, 59 aa, Artificial Sequence; identical to SEQ ID NO: 25594
  Synthetic polypeptide

SEQ ID NO: 25596 - protein, 59 aa, Artificial Sequence; identical to SEQ ID NO: 25594
  Synthetic polypeptide

SEQ ID NO: 25597 - protein, 59 aa, Artificial Sequence; identical to SEQ ID NO: 25594
  Synthetic polypeptide

SEQ ID NO: 25598 - protein, 59 aa, Artificial Sequence; identical to SEQ ID NO: 25594
  Synthetic polypeptide

SEQ ID NO: 25599 - protein, 59 aa, Artificial Sequence; identical to SEQ ID NO: 25594
  Synthetic polypeptide

SEQ ID NO: 25600 - protein, 24 aa, Artificial Sequence
  Synthetic polypeptide
PGMGAAGGERSDSGRPAQGGPDRV

SEQ ID NO: 25601 - protein, 24 aa, Artificial Sequence
  Synthetic polypeptide
PGMGAAGGERSDSGRPAQGGPDRV

SEQ ID NO: 25602 - protein, 24 aa, Artificial Sequence
  Synthetic polypeptide
PGMGAAGGERSDSGRPAQGGPDRV

SEQ ID NO: 25603 - protein, 24 aa, Artificial Sequence
  Synthetic polypeptide
PGMGAAGGERSDSGRPAQGGPDRV

SEQ ID NO: 25604 - protein, 24 aa, Artificial Sequence
  Synthetic polypeptide
PGMGAAGGERSDSGRPAQGGPDRV

SEQ ID NO: 25605 - protein, 24 aa, Artificial Sequence
  Synthetic polypeptide
PGMGAAGGERSDSGRPAQGGPDRV

SEQ ID NO: 25606 - protein, 33 aa, Artificial Sequence
  Synthetic polypeptide
AEKQVTGNEGSGGAAGGERSDSGRPAQGGPDRV

SEQ ID NO: 25607 - protein, 33 aa, Artificial Sequence; identical to SEQ ID NO: 25606
  Synthetic polypeptide

SEQ ID NO: 25608 - protein, 33 aa, Artificial Sequence; identical to SEQ ID NO: 25606
  Synthetic polypeptide

SEQ ID NO: 25609 - protein, 33 aa, Artificial Sequence; identical to SEQ ID NO: 25606
  Synthetic polypeptide

SEQ ID NO: 25610 - protein, 33 aa, Artificial Sequence; identical to SEQ ID NO: 25606
  Synthetic polypeptide

SEQ ID NO: 25611 - protein, 33 aa, Artificial Sequence; identical to SEQ ID NO: 25606
  Synthetic polypeptide

SEQ ID NO: 25612 - protein, 112 aa, Artificial Sequence
  Synthetic polypeptide
PGMKEVGELQEESGLTVDALHKVGQIVFEFVGEPELMDVHVFCTDSIQGTPVESDEMRPCWFQLDQIPFKDMWPDDSYWFPLLLQKKKFHGYFKFQGQDTILDYTLREVDTV

SEQ ID NO: 25613 - protein, 112 aa, Artificial Sequence; identical to SEQ ID NO: 25612
  Synthetic polypeptide

SEQ ID NO: 25614 - protein, 112 aa, Artificial Sequence; identical to SEQ ID NO: 25612
  Synthetic polypeptide

SEQ ID NO: 25615 - protein, 112 aa, Artificial Sequence; identical to SEQ ID NO: 25612
  Synthetic polypeptide

SEQ ID NO: 25616 - protein, 112 aa, Artificial Sequence; identical to SEQ ID NO: 25612
  Synthetic polypeptide

SEQ ID NO: 25617 - protein, 112 aa, Artificial Sequence; identical to SEQ ID NO: 25612
  Synthetic polypeptide

SEQ ID NO: 25618 - protein, 11 aa, Artificial Sequence
  Synthetic polypeptide
RKWGSCRRRAV

SEQ ID NO: 25619 - protein, 11 aa, Artificial Sequence
  Synthetic polypeptide
RKWGSCRRRAV

SEQ ID NO: 25620 - protein, 11 aa, Artificial Sequence
  Synthetic polypeptide
RKWGSCRRRAV

SEQ ID NO: 25621 - protein, 11 aa, Artificial Sequence
  Synthetic polypeptide
RKWGSCRRRAV

SEQ ID NO: 25622 - protein, 11 aa, Artificial Sequence
  Synthetic polypeptide
RKWGSCRRRAV

SEQ ID NO: 25623 - protein, 11 aa, Artificial Sequence
  Synthetic polypeptide
RKWGSCRRRAV

SEQ ID NO: 25624 - protein, 46 aa, Artificial Sequence
  Synthetic polypeptide
AEKQVTGNEGSGVSPNPATCGSRDGGQVAGLHWAWAVTGSCRRRAV

SEQ ID NO: 25625 - protein, 46 aa, Artificial Sequence; identical to SEQ ID NO: 25624
  Synthetic polypeptide

SEQ ID NO: 25626 - protein, 46 aa, Artificial Sequence; identical to SEQ ID NO: 25624
  Synthetic polypeptide

SEQ ID NO: 25627 - protein, 46 aa, Artificial Sequence; identical to SEQ ID NO: 25624
  Synthetic polypeptide

SEQ ID NO: 25628 - protein, 46 aa, Artificial Sequence; identical to SEQ ID NO: 25624
  Synthetic polypeptide

SEQ ID NO: 25629 - protein, 46 aa, Artificial Sequence; identical to SEQ ID NO: 25624
  Synthetic polypeptide

SEQ ID NO: 25630 - protein, 54 aa, Artificial Sequence
  Synthetic polypeptide
PGMKEVGSVPTLPRAGLETVDKWLDSTGPGLSLGAAGGERSDSGRPAQGGPDRV

SEQ ID NO: 25631 - protein, 54 aa, Artificial Sequence; identical to SEQ ID NO: 25630
  Synthetic polypeptide

SEQ ID NO: 25632 - protein, 54 aa, Artificial Sequence; identical to SEQ ID NO: 25630
  Synthetic polypeptide

SEQ ID NO: 25633 - protein, 54 aa, Artificial Sequence; identical to SEQ ID NO: 25630
  Synthetic polypeptide

SEQ ID NO: 25634 - protein, 54 aa, Artificial Sequence; identical to SEQ ID NO: 25630
  Synthetic polypeptide

SEQ ID NO: 25635 - protein, 54 aa, Artificial Sequence; identical to SEQ ID NO: 25630
  Synthetic polypeptide

SEQ ID NO: 25636 - protein, 135 aa, Artificial Sequence
  Synthetic polypeptide
RKWGQSQPCHVRVSRRWTSGWTPLGLGCHWELQEESGLTVDALHKVGQIVFEFVGEPELMDVHVFCTDSIQGTPVESDEMRPCWFQLDQIPFKDMWPDDSYWFPLLLQKKKFHGYFKFQGQDTILDYTLREVDTV

SEQ ID NO: 25637 - protein, 135 aa, Artificial Sequence; identical to SEQ ID NO: 25636
  Synthetic polypeptide

SEQ ID NO: 25638 - protein, 135 aa, Artificial Sequence; identical to SEQ ID NO: 25636
  Synthetic polypeptide

SEQ ID NO: 25639 - protein, 135 aa, Artificial Sequence; identical to SEQ ID NO: 25636
  Synthetic polypeptide

SEQ ID NO: 25640 - protein, 135 aa, Artificial Sequence; identical to SEQ ID NO: 25636
  Synthetic polypeptide

SEQ ID NO: 25641 - protein, 135 aa, Artificial Sequence; identical to SEQ ID NO: 25636
  Synthetic polypeptide

SEQ ID NO: 25642 - protein, 12 aa, Artificial Sequence
  Synthetic polypeptide
ILISTKDDPRIS

SEQ ID NO: 25643 - protein, 12 aa, Artificial Sequence
  Synthetic polypeptide
ILISTKDDPRIS

SEQ ID NO: 25644 - protein, 12 aa, Artificial Sequence
  Synthetic polypeptide
ILISTKDDPRIS

SEQ ID NO: 25645 - protein, 12 aa, Artificial Sequence
  Synthetic polypeptide
ILISTKDDPRIS

SEQ ID NO: 25646 - protein, 544 aa, Artificial Sequence
  Synthetic polypeptide
FLLKMTLGFHDVLGNERPSAYMREHNQLNGWSSDENDWNEKLYPVWKRGDMRWKNSWKGGRVQAVLTSDSPALVGSNITFAVNLIFPRCQKEDANGNIVYEKNCRNEAGLSADPYVYNWTAWSEDSDGENGTGQSHHNVFPDGKPFPHHPGWRRWNFIYVFHTLGQYFQKLGRCSVRVSVNTANVTLGPQLMEVTVYRRHGRAYVPIAQVKDVYVVTDQIPVFVTMFQKNDRNSSDETFLKDLPIMFDVLIHDPSHFLNYSTINYKWSFGDNTGLFVSTNHTVNHTYVLNGTFSLNLTVKAAAPGPCPPPPPPPRPSKPTPSLGPAGDNPLELSRIPDENCQINRYGHFQATITIVEGILEVNIIQMTDVLMPVPWPESSLIDFVVTCQGSIPTEVCTIISDPTCEITQNTVCSPVDVDEMCLLTVRRTFNGSGTYCVNLTLGDDTSLALTSTLISVPDRDPASPLRMANSALISVGCLAIFVTVISLLVYKKHKEYNPIENSPGNVVRSKGLSVFLNRAKAVFFPGNQEKDPLLKNQEFKGVS

SEQ ID NO: 25647 - protein, 556 aa, Artificial Sequence
  Synthetic polypeptide
FLLKMTLGFHDVLGNERPSAYMREHNQLNGWSSDENDWNEKLYPVWKRGDMRWKNSWKGGRVQAVLTSDSPALVGSNITFAVNLIFPRCQKEDANGNIVYEKNCRNEAGLSADPYVYNWTAWSEDSDGENGTGQSHHNVFPDGKPFPHHPGWRRWNFIYVFHTLGQYFQKLGRCSVRVSVNTANVTLGPQLMEVTVYRRHGRAYVPIAQVKDVYVVTDQIPVFVTMFQKNDRNSSDETFLKDLPIMFDVLIHDPSHFLNYSTINYKWSFGDNTGLFVSTNHTVNHTYVLNGTFSLNLTVKAAAPGPCPPPPPPPRPSKPTPSLATTLKSYDSNTPGPAGDNPLELSRIPDENCQINRYGHFQATITIVEGILEVNIIQMTDVLMPVPWPESSLIDFVVTCQGSIPTEVCTIISDPTCEITQNTVCSPVDVDEMCLLTVRRTFNGSGTYCVNLTLGDDTSLALTSTLISVPDRDPASPLRMANSALISVGCLAIFVTVISLLVYKKHKEYNPIENSPGNVVRSKGLSVFLNRAKAVFFPGNQEKDPLLKNQEFKGVS

SEQ ID NO: 25648 - protein, 190 aa, Artificial Sequence
  Synthetic polypeptide
FLLKMTLGFHDVLGNERPSAYMREHNQLNGWSSDENDWNEKLYPVWKRGDMRWKNSWKGGRVQAVLTSDSPALVGSNITFAVNLIFPRCQKEDANGNIVYEKNCRNEAGLSADPYVYNWTAWSEDSDGENGTGQSHHNVFPDGKPFPHHPGWRRWNFIYVFHTLGWLLQTPKLLLYLSLKFQPSLFLLYN

SEQ ID NO: 25649 - protein, 498 aa, Artificial Sequence
  Synthetic polypeptide
FLLKMTLGFHDVLGNERPSAYMREHNQLNGWSSDENDWNEKLYPVWKRGDMRWKNSWKGGRVQAVLTSDSPALVGSNITFAVNLIFPRCQKEDANGNIVYEKNCRNGQYFQKLGRCSVRVSVNTANVTLGPQLMEVTVYRRHGRAYVPIAQVKDVYVVTDQIPVFVTMFQKNDRNSSDETFLKDLPIMFDVLIHDPSHFLNYSTINYKWSFGDNTGLFVSTNHTVNHTYVLNGTFSLNLTVKAAAPGPCPPPPPPPRPSKPTPSLATTLKSYDSNTPGPAGDNPLELSRIPDENCQINRYGHFQATITIVEGILEVNIIQMTDVLMPVPWPESSLIDFVVTCQGSIPTEVCTIISDPTCEITQNTVCSPVDVDEMCLLTVRRTFNGSGTYCVNLTLGDDTSLALTSTLISVPDRDPASPLRMANSALISVGCLAIFVTVISLLVYKKHKEYNPIENSPGNVVRSKGLSVFLNRAKAVFFPGNQEKDPLLKNQEFKGVS

SEQ ID NO: 25650 - protein, 86 aa, Artificial Sequence
  Synthetic polypeptide
GAPPSGSHPVWEVRSPSAWQPPRLETDLKRTIAVLLDDILQRLVKLENKVDYIVVNGSAANTTNGTSGNLVPVTTNKRTNVSGSIR

SEQ ID NO: 25651 - protein, 86 aa, Artificial Sequence; identical to SEQ ID NO: 25650
  Synthetic polypeptide

SEQ ID NO: 25652 - protein, 86 aa, Artificial Sequence; identical to SEQ ID NO: 25650
  Synthetic polypeptide

SEQ ID NO: 25653 - protein, 14 aa, Artificial Sequence
  Synthetic polypeptide
GAPPPGSHPVWKRI

SEQ ID NO: 25654 - protein, 14 aa, Artificial Sequence
  Synthetic polypeptide
GAPPPGSHPVWKRI

SEQ ID NO: 25655 - protein, 14 aa, Artificial Sequence
  Synthetic polypeptide
GAPPPGSHPVWKRI

SEQ ID NO: 25656 - protein, 14 aa, Artificial Sequence
  Synthetic polypeptide
GAPPPGSHPVWKRI

SEQ ID NO: 25657 - protein, 39 aa, Artificial Sequence
  Synthetic polypeptide
EVRSPSVRQPSRLGSEEPLRLAATPSGNGSEKNNCCPSG

SEQ ID NO: 25658 - protein, 39 aa, Artificial Sequence; identical to SEQ ID NO: 25657
  Synthetic polypeptide

SEQ ID NO: 25659 - protein, 39 aa, Artificial Sequence; identical to SEQ ID NO: 25657
  Synthetic polypeptide

SEQ ID NO: 25660 - protein, 39 aa, Artificial Sequence; identical to SEQ ID NO: 25657
  Synthetic polypeptide

SEQ ID NO: 25661 - protein, 56 aa, Artificial Sequence
  Synthetic polypeptide
GAPPSGSHPVWEVRSPSAWQPPRLETDLKRTIAVLLDDILQRLVKLENKVDYIVVN

SEQ ID NO: 25662 - protein, 251 aa, Artificial Sequence
  Synthetic polypeptide
SAFEQDPLGILIVGEDDGGKLFTPEEYEEYKRKVLPLRLQNRLFVSWRSPTGMDCKLVGPETLCFCTHRYKQHKTDLEAIPQQCPIDLPCQVTGCQCRAYLYVPLNGSQPIRCRCKHFADQHSAAPGFTCNTCSKCSGFHSCFTCACGQPAYAHDTVVETKQERLAQEKPVGQDIPYAAMGGLTGFSSLAEGYMRLDDSGIVGTSSQVSSLRRPEEDDMAFFERRYQERMKMEKAAKWKGKAPLPSATKPS

SEQ ID NO: 25663 - protein, 10 aa, Artificial Sequence
  Synthetic polypeptide
ARSPGDSNCW

SEQ ID NO: 25664 - protein, 10 aa, Artificial Sequence
  Synthetic polypeptide
ARSPGDSNCW

SEQ ID NO: 25665 - protein, 10 aa, Artificial Sequence
  Synthetic polypeptide
ARSPGDSNCW

SEQ ID NO: 25666 - protein, 10 aa, Artificial Sequence
  Synthetic polypeptide
ARSPGDSNCW

SEQ ID NO: 25667 - protein, 287 aa, Artificial Sequence
  Synthetic polypeptide
SAFEQDPLGILIVGEDDGGKLFTPEEYEEYKRKVLPLRLQNRLFVSWRSPTGMDCKLVGPETLCFCTHRYKQHKTDLEAIPQQCPIDLPCQVTGCQCRAYLYVPLNGSQPIRCRCKHFADQHSAAPGFTCNTCSKCSGFHSCFTCACGQPAYAHDTVVETKQERLAQEKPVGQDIPYAAMGGLTGFSSLAEGYMRLDDSGIGVPSVEFLESPITAVDSPFLKAFQASSSSSPETLTDVGTSSQVSSLRRPEEDDMAFFERRYQERMKMEKAAKWKGKAPLPSATKPS

SEQ ID NO: 25668 - protein, 103 aa, Artificial Sequence
  Synthetic polypeptide
SAFEQDPLGILIVGEDDGGKLFTPEEYEEYKRKVLPLRLQNRLFVSWRSPTGMDCKLVGPETLCFCTHRVLLCHSGWSAVARSWLIAASTSWAQAILRPQPPK

SEQ ID NO: 25669 - protein, 87 aa, Artificial Sequence
  Synthetic polypeptide
SAFEQDPLGILIVGEDDGGKLFTPEEYEEYKRKVLPLRLQNRLFVSWRSPTGMDCKLVGPETLCFCTHSRDGGFHRVSQDGLDLLTL

SEQ ID NO: 25670 - protein, 109 aa, Artificial Sequence
  Synthetic polypeptide
GRARWLTPVIPALWEAKRWTETYVRWSPKGTYLATFHQRGIALWGGEKFKQIQRFSHQGVQLIDFSPCERYLVTFSPLMDTQDDPQAIIIWDILTGHKKRGFHCESSAH

SEQ ID NO: 25671 - protein, 63 aa, Artificial Sequence
  Synthetic polypeptide
SQHFGRPRDGQRRMCVGLLRAPTWLPFIKEALLYGGERNSSKFRDSATKGFSLLTSHLVKGTW

SEQ ID NO: 25672 - protein, 63 aa, Artificial Sequence; identical to SEQ ID NO: 25671
  Synthetic polypeptide

SEQ ID NO: 25673 - protein, 63 aa, Artificial Sequence; identical to SEQ ID NO: 25671
  Synthetic polypeptide

SEQ ID NO: 25674 - protein, 27 aa, Artificial Sequence
  Synthetic polypeptide
PGAVAHACNPSTLGGQEMDRDVCALVS

SEQ ID NO: 25675 - protein, 27 aa, Artificial Sequence
  Synthetic polypeptide
PGAVAHACNPSTLGGQEMDRDVCALVS

SEQ ID NO: 25676 - protein, 27 aa, Artificial Sequence
  Synthetic polypeptide
PGAVAHACNPSTLGGQEMDRDVCALVS

SEQ ID NO: 25677 - protein, 498 aa, Artificial Sequence
  Synthetic polypeptide
GRARWLTPVIPALWEAKRWTETYVRWSPKGTYLATFHQRGIALWGGEKFKQIQRFSHQGVQLIDFSPCERYLVTFSPLMDTQDDPQAIIIWDILTGHKKRGFHCESSAHWPIFKWSHDGKFFARMTLDTLSIYETPSMGLLDKKSLKISGIKDFSWSPGGNIIAFWVPEDKDIPARVTLMQLPTRQEIRVRNLFNVVDCKLHWQKNGDYLCVKVDRTPKGTQGVVTNFEIFRMREKQVPVDVVEMKETIIAFAWEPNGSKFAVLHGEAPRISVSFYHVKNNGKIELIKMFDKQQANTIFWSPQGQFVVLAGLRSMNGALAFVDTSDCTVMNIAEHYMASDVEWDPTGRYVVTSVSWWSHKVDNAYWLWTFQGRLLQKNNKDRFCQLLWRPRPPTLLSQEQIKQIKKDLKKYSKIFEQKDRLSQSKASKELVERRRTMMEDFRKYRKMAQELYMEQKNERLELRGGVDTDELDSNVDDWEEETIEFFVTEEIIPLGNQE

SEQ ID NO: 25678 - protein, 498 aa, Artificial Sequence; identical to SEQ ID NO: 25677
  Synthetic polypeptide

SEQ ID NO: 25679 - protein, 25 aa, Artificial Sequence
  Synthetic polypeptide
GRARWLTPVIPALWEAKRWTETYVR

SEQ ID NO: 25680 - protein, 16 aa, Artificial Sequence
  Synthetic polypeptide
SQHFGRPRDGQRRMCV

SEQ ID NO: 25681 - protein, 24 aa, Artificial Sequence
  Synthetic polypeptide
PGAVAHACNPSTLGGQEMDRDVCA

SEQ ID NO: 25682 - protein, 58 aa, Artificial Sequence
  Synthetic polypeptide
GKGLFLFLRSIPGQDSIRHLVSSRYGKRSSPETLISDLLMRESTENVPRTRLEDPAMW

SEQ ID NO: 25683 - protein, 58 aa, Artificial Sequence; identical to SEQ ID NO: 25682
  Synthetic polypeptide

SEQ ID NO: 25684 - protein, 58 aa, Artificial Sequence; identical to SEQ ID NO: 25682
  Synthetic polypeptide

SEQ ID NO: 25685 - protein, 13 aa, Artificial Sequence
  Synthetic polypeptide
SALDMENDPAQRH

SEQ ID NO: 25686 - protein, 13 aa, Artificial Sequence
  Synthetic polypeptide
SALDMENDPAQRH

SEQ ID NO: 25687 - protein, 13 aa, Artificial Sequence
  Synthetic polypeptide
SALDMENDPAQRH

SEQ ID NO: 25688 - protein, 505 aa, Artificial Sequence
  Synthetic polypeptide
NENGVLREKHEAVDHSSQHEENEERVSAQKENSLQQNDDDENKIAEKPDWEAEKTTESRNERHLNGTDTSFSLEDLFQLLSSQPENSLEGISLGDIPLPGSISDGMNSSAHYHVNFSQAISQDVNLHEAILLCPNNTFRRDPTARTSQSQEPFLQLNSHTTNPEQTLPGTNLTGFLSPVDNHMRNLTSQDLLYDLDINIFDEINLMSLATEDNFDPIDVSQLFDEPDSDSGLSLDSSHNNTSVIKSNSSHSVCDEGAIGYCTDHESSSHHDLEGAVGGYYPEPSKLCHLDQSDSDFHGDLTFQHVFHNHTYHLQPTAPESTSEPFPWPGKSQKIRSRYLEDTDRNLSRDEQRAKALHIPFSVDEIVGMPVDSFNSMLSRYYLTDLQVSLIRDIRRRGKNKVAAQNCRKRKLDIILNLEDDVCNLQAKKETLKREQAQCNKAINIMKQKLHDLYHDIFSRLRDDQGRPVNPNHYALQCTHDGSILIVPKELVASGHKKETQKGKRK

SEQ ID NO: 25689 - protein, 6 aa, Artificial Sequence
  Synthetic polypeptide
RMRMGY

SEQ ID NO: 25690 - protein, 191 aa, Artificial Sequence
  Synthetic polypeptide
RLSPPSLCTSRCCHVAKEVFSSPSAMIINFLRPPQPCGTKRKRHQRCAHSETRHMRTQRQGGYLQARERGLGEANPAYALILDFQPPELQNLSEMGINHELGYSSIIPMMKRAFSACGTLGLIMSGIFDNPGPIKNTLKKAFTMLWSFTVYTRLESLRVALSNEEMVPFIFHLKTQTANMLSGPISTPMLL

SEQ ID NO: 25691 - protein, 23 aa, Artificial Sequence
  Synthetic polypeptide
GLPSPAELRGRDTRDVHTQRQDT

SEQ ID NO: 25692 - protein, 33 aa, Artificial Sequence
  Synthetic polypeptide
YIPWIEVCGCVCPPFQDKQIQCGKDLQQHAVSY

SEQ ID NO: 25693 - protein, 33 aa, Artificial Sequence; identical to SEQ ID NO: 25692
  Synthetic polypeptide

SEQ ID NO: 25694 - protein, 188 aa, Artificial Sequence
  Synthetic polypeptide
TLNDTMGPIQSATSDAGSAPKKLRKVMTLQEKVELPDTYHGLRSAAAFALHFKINKSNAAKICNNMLLAISMIGTAEAMNLGIRLGLDPKLLAKILNMSSGRCWSSDTYNPVPGVMDGVPSANNYQGGFGTTLMAKDLGLAQDSATSTKSPILLGSLAHQIYRMMCAKGYSKKDFSSVFQFLREEETF

SEQ ID NO: 25695 - protein, 13 aa, Artificial Sequence
  Synthetic polypeptide
TNPMRQRSATTCC

SEQ ID NO: 25696 - protein, 13 aa, Artificial Sequence
  Synthetic polypeptide
TNPMRQRSATTCC

SEQ ID NO: 25697 - protein, 115 aa, Artificial Sequence
  Synthetic polypeptide
TLNDTMGPIQSATSDAGSAPKKLRKVMTLQEKVELPDTYHGLRSAAAFALHFKINKSNAAKICNNMLLAISMIGTAEAMNLGIRLGLDPKLLAKILNMSSGRCWSSDTYNPVPGV

SEQ ID NO: 25698 - protein, 30 aa, Artificial Sequence
  Synthetic polypeptide
SGVVISRAYFQMLLKKLTELLQCCPPVSMQ

SEQ ID NO: 25699 - protein, 30 aa, Artificial Sequence; identical to SEQ ID NO: 25698
  Synthetic polypeptide

SEQ ID NO: 25700 - protein, 9 aa, Artificial Sequence
  Synthetic polypeptide
YRVLIFRCC

SEQ ID NO: 25701 - protein, 9 aa, Artificial Sequence
  Synthetic polypeptide
YRVLIFRCC

SEQ ID NO: 25702 - protein, 9 aa, Artificial Sequence
  Synthetic polypeptide
YRVLIFRCC

SEQ ID NO: 25703 - protein, 317 aa, Artificial Sequence
  Synthetic polypeptide
VQNSRNKQFISFKLHAVLSSMMKSCAVQLCPNLDVNHPFVQRLHAADTPWPISHLLAASVIGCCDIACLFSDVAEKADRIITMLPTSINAIEAYSGANGILKKVKKGSLLIDSSTIDPAVSKELAKEVEKMGAVFMDAPVSGGVGAARSGNLTFMVGGVEDEFAAAQELLGCMGSNVVYCGAVGTGQAAKICNNMLLAISMIGTAEAMNLGIRLGLDPKLLAKILNMSSGRCWSSDTYNPVPGVMDGVPSANNYQGGFGTTLMAKDLGLAQDSATSTKSPILLGSLAHQIYRMMCAKGYSKKDFSSVFQFLREEETF

SEQ ID NO: 25704 - protein, 14 aa, Artificial Sequence
  Synthetic polypeptide
SGVVISRAYFQMLL

SEQ ID NO: 25705 - protein, 74 aa, Artificial Sequence
  Synthetic polypeptide
VQNSRNKQFISFKLHAVLSSMMKSCAVQLCPNLDVNHPFVQRLHAADTPWPISHLLAASVIGCCDIACLFSDVA

SEQ ID NO: 25706 - protein, 244 aa, Artificial Sequence
  Synthetic polypeptide
VQNSRNKQFISFKLHAVLSSMMKSCAVQLCPNLDVNHPFVQRLHAADTPWPISHLLAASVIGCCDIACLFSDVAEKADRIITMLPTSINAIEAYSGANGILKKVKKGSLLIDSSTIDPAVSKELAKEVEKMGAVFMDAPVSGGVGAARSGNLTFMVGGVEDEFAAAQELLGCMGSNVVYCGAVGTGQAAKICNNMLLAISMIGTAEAMNLGIRLGLDPKLLAKILNMSSGRCWSSDTYNPVPGV

SEQ ID NO: 25707 - protein, 271 aa, Artificial Sequence
  Synthetic polypeptide
NGSVGRFKEYMRVTYRGLWHPVHTFRGPHWCEYCANFMWGLIAQGVRCSDCGLNVHKQCSKHVPNDCQPDLKRIKKVYCCDLTTLVKAHNTQRPMVVDICIREIEARGLKSEGLYRVSGFTEHIEDVKMAFDRDGEKADISANVYPDINIITGALKLYFRDLPIPVITYDTYSKFIDAAKISNADERLEAVHEVLMLLPPAHYETLRYLMIHLKKVTMNEKDNFMNAENLGIVFGPTLMRPPEDSTLTTLHDMRYQKLIVQILIENEDVLF

SEQ ID NO: 25708 - protein, 271 aa, Artificial Sequence; identical to SEQ ID NO: 25707
  Synthetic polypeptide

SEQ ID NO: 25709 - protein, 271 aa, Artificial Sequence; identical to SEQ ID NO: 25707
  Synthetic polypeptide

SEQ ID NO: 25710 - protein, 271 aa, Artificial Sequence; identical to SEQ ID NO: 25707
  Synthetic polypeptide

SEQ ID NO: 25711 - protein, 271 aa, Artificial Sequence; identical to SEQ ID NO: 25707
  Synthetic polypeptide

SEQ ID NO: 25712 - protein, 271 aa, Artificial Sequence; identical to SEQ ID NO: 25707
  Synthetic polypeptide

SEQ ID NO: 25713 - protein, 271 aa, Artificial Sequence; identical to SEQ ID NO: 25707
  Synthetic polypeptide

SEQ ID NO: 25714 - protein, 62 aa, Artificial Sequence
  Synthetic polypeptide
SLCLSSLIYKMGVLGGLKNTCESLIVVSGTQSTRSEAHTGVNIVPISCGGSSPKGSGAQTVD

SEQ ID NO: 25715 - protein, 62 aa, Artificial Sequence; identical to SEQ ID NO: 25714
  Synthetic polypeptide

SEQ ID NO: 25716 - protein, 62 aa, Artificial Sequence; identical to SEQ ID NO: 25714
  Synthetic polypeptide

SEQ ID NO: 25717 - protein, 62 aa, Artificial Sequence; identical to SEQ ID NO: 25714
  Synthetic polypeptide

SEQ ID NO: 25718 - protein, 62 aa, Artificial Sequence; identical to SEQ ID NO: 25714
  Synthetic polypeptide

SEQ ID NO: 25719 - protein, 62 aa, Artificial Sequence; identical to SEQ ID NO: 25714
  Synthetic polypeptide

SEQ ID NO: 25720 - protein, 62 aa, Artificial Sequence; identical to SEQ ID NO: 25714
  Synthetic polypeptide

SEQ ID NO: 25721 - protein, 62 aa, Artificial Sequence; identical to SEQ ID NO: 25714
  Synthetic polypeptide

SEQ ID NO: 25722 - protein, 62 aa, Artificial Sequence; identical to SEQ ID NO: 25714
  Synthetic polypeptide

SEQ ID NO: 25723 - protein, 23 aa, Artificial Sequence
  Synthetic polypeptide
RIHASHLSWSLAPSPHVPRPTLV

SEQ ID NO: 25724 - protein, 23 aa, Artificial Sequence
  Synthetic polypeptide
RIHASHLSWSLAPSPHVPRPTLV

SEQ ID NO: 25725 - protein, 23 aa, Artificial Sequence
  Synthetic polypeptide
RIHASHLSWSLAPSPHVPRPTLV

SEQ ID NO: 25726 - protein, 23 aa, Artificial Sequence
  Synthetic polypeptide
RIHASHLSWSLAPSPHVPRPTLV

SEQ ID NO: 25727 - protein, 23 aa, Artificial Sequence
  Synthetic polypeptide
RIHASHLSWSLAPSPHVPRPTLV

SEQ ID NO: 25728 - protein, 23 aa, Artificial Sequence
  Synthetic polypeptide
RIHASHLSWSLAPSPHVPRPTLV

SEQ ID NO: 25729 - protein, 23 aa, Artificial Sequence
  Synthetic polypeptide
RIHASHLSWSLAPSPHVPRPTLV

SEQ ID NO: 25730 - protein, 23 aa, Artificial Sequence
  Synthetic polypeptide
RIHASHLSWSLAPSPHVPRPTLV

SEQ ID NO: 25731 - protein, 23 aa, Artificial Sequence
  Synthetic polypeptide
RIHASHLSWSLAPSPHVPRPTLV

SEQ ID NO: 25732 - protein, 23 aa, Artificial Sequence
  Synthetic polypeptide
RIHASHLSWSLAPSPHVPRPTLV

SEQ ID NO: 25733 - protein, 158 aa, Artificial Sequence
  Synthetic polypeptide
NGSVGRFKEYMRVTYRGLWHPVHTFRGPHWCEYCANFMWGLIAQGVRCSDCGLNVHKQCSKHVPNDCQPDLKRIKKVYCCDLTTLVKAHNTQRPMVVDICIREIEARGLKSEGLYRVSGFTEHIEDVKMAFDRDGEKADISANVYPDINIITGALKLY

SEQ ID NO: 25734 - protein, 213 aa, Artificial Sequence
  Synthetic polypeptide
NGSVGRFKEYMRVTYRGLWHPVHTFRGPHWCEYCANFMWGLIAQGVRCSGLKSEGLYRVSGFTEHIEDVKMAFDRDGEKADISANVYPDINIITGALKLYFRDLPIPVITYDTYSKFIDAAKISNADERLEAVHEVLMLLPPAHYETLRYLMIHLKKVTMNEKDNFMNAENLGIVFGPTLMRPPEDSTLTTLHDMRYQKLIVQILIENEDVLF

SEQ ID NO: 25735 - protein, 60 aa, Artificial Sequence
  Synthetic polypeptide
SLCLSSLIYKMGVLGGLKNTCESLIVVSGTQSTRSEAHTGVNIVPISCGGSSPKGSGAQD

SEQ ID NO: 25736 - protein, 225 aa, Artificial Sequence
  Synthetic polypeptide
NGSVGRFKEYMRVTYRGLWHPVHTFRGPHWCEYCANFMWGLIAQGVRCSDCGLNVHKQCSKHVPNDCQPDLKRIKKVYCCDLTTLVKAHNTQRPMVVDICIREIEARGLKSEGLYRVSGFTEHIEDVKMAFDREISNADERLEAVHEVLMLLPPAHYETLRYLMIHLKKVTMNEKDNFMNAENLGIVFGPTLMRPPEDSTLTTLHDMRYQKLIVQILIENEDVLF

SEQ ID NO: 25737 - protein, 39 aa, Artificial Sequence
  Synthetic polypeptide
SPHQKQMLAPCFLHSLQDCKHRHLQLAKGRSERPECAVG

SEQ ID NO: 25738 - protein, 39 aa, Artificial Sequence; identical to SEQ ID NO: 25737
  Synthetic polypeptide

SEQ ID NO: 25739 - protein, 39 aa, Artificial Sequence; identical to SEQ ID NO: 25737
  Synthetic polypeptide

SEQ ID NO: 25740 - protein, 506 aa, Artificial Sequence
  Synthetic polypeptide
KEPGASPCLSSFLSYHVIWTHWLHFAFYHKWNQPEAPTRSRCLRHASCTACRTVSTDTSSLRRADPKGRSALLADIQQGTRLRKVTQINDRSAPQIESSKGTNKEGGGSANTRGASTPPTLGDLFAGGFPVLRPAGQRDVAGGKTGQGPGSRAPSPRLPNKTISGPLIPPASPRLGNTSEAHGAARTAPPRPNVPAPPPPTPPPPPPPLPPPLPSSSPIKTPLVSPPGPLTKGNLPVVAPPVPCAPPPPPPPPPPTPPPLPPASVLSDKAVKPQLAPLHLPPIPPPLPLLPPCGYPGLKAEPASPAQDAQEPPAPPPPLPPYASCSPRASLPAPPLPGVNSSSETPPPLPPKSPSFQAPPQKAGAQALPAPPAPPGSQPFLQKKRHGRPGAGGGKLNPPPAPPARSPTTELSSKSQQATAWTPTQQPGGQLRNGSLHIIDDFESKFTFHSVEDFPPPDEYKPCQKIYPSKIPRSRTPGPWLQAEAVGQSSDDIKGRNSQVTQASCL

SEQ ID NO: 25741 - protein, 506 aa, Artificial Sequence; identical to SEQ ID NO: 25740
  Synthetic polypeptide

SEQ ID NO: 25742 - protein, 36 aa, Artificial Sequence
  Synthetic polypeptide
SGHTGSTLPSTISGISLKPPPEADACAMLLAQPAGL

SEQ ID NO: 25743 - protein, 36 aa, Artificial Sequence; identical to SEQ ID NO: 25742
  Synthetic polypeptide

SEQ ID NO: 25744 - protein, 36 aa, Artificial Sequence; identical to SEQ ID NO: 25742
  Synthetic polypeptide

SEQ ID NO: 25745 - protein, 506 aa, Artificial Sequence
  Synthetic polypeptide
KEPGASPCLSSFLSYHVIWTHWLHFAFYHKWNQPEAPTRSRCLRHASCTACRTVSTDTSSLRRADPKGRSALLADIQQGTRLRKVTQINDRSAPQIESSKGTNKEGGGSANTRGASTPPTLGDLFAGGFPVLRPAGQRDVAGGKTGQGPGSRAPSPRLPNKTISGPLIPPASPRLGNTSEAHGAARTAPPRPNVPAPPPPTPPPPPPPLPPPLPSSSPIKTPLVSPPGPLTKGNLPVVAPPVPCAPPPPPPPPPPTPPPLPPASVLSDKAVKPQLAPLHLPPIPPPLPLLPPCGYPGLKAEPASPAQDAQEPPAPPPPLPPYASCSPRASLPAPPLPGVNSSSETPPPLPPKSPSFQAPPQKAGAQALPAPPAPPGSQPFLQKKRHGRPGAGGGKLNPPPAPPARSPTTELSSKSQQATAWTPTQQPGGQLRNGSLHIIDDFESKFTFHSVEDFPPPDEYKPCQKIYPSKIPRSRTPGPWLQAEAVGQSSDDIKGRNSQLSLKTLR

SEQ ID NO: 25746 - protein, 38 aa, Artificial Sequence
  Synthetic polypeptide
KENRTEQNIRMQCACLNGNLIKPEEAKVYEDEKRIICF

SEQ ID NO: 25747 - protein, 36 aa, Artificial Sequence
  Synthetic polypeptide
NLFGTCHKIDQFGELQPTIFKKKTEQNKISGCNVHA

SEQ ID NO: 25748 - protein, 57 aa, Artificial Sequence
  Synthetic polypeptide
VFFKLCFRTCLELVIKSISLVNCNQQYLKRKQNRTKYQDAMCMPKWKPDKTRGGQSL

SEQ ID NO: 25749 - protein, 19 aa, Artificial Sequence
  Synthetic polypeptide
VLSSCLHAEWLWEASKGTR

SEQ ID NO: 25750 - protein, 19 aa, Artificial Sequence
  Synthetic polypeptide
VLSSCLHAEWLWEASKGTR

SEQ ID NO: 25751 - protein, 34 aa, Artificial Sequence
  Synthetic polypeptide
EEGWALASERPRFKCSPAAYMLSGCGRPPRGHAD

SEQ ID NO: 25752 - protein, 34 aa, Artificial Sequence; identical to SEQ ID NO: 25751
  Synthetic polypeptide

SEQ ID NO: 25753 - protein, 215 aa, Artificial Sequence
  Synthetic polypeptide
VAVGGLQGDTLIDIGSGPTIYQVLAACDSFQDITLSDFTDRNREELEKWLKKEPGAYDWTPAVKFACELEGNSGRWEEKEEKLRAAVKRVLKCDVHLGNPLAPAVLPLADCVLTLLAMECACCSLDAYRAALCNLASLLKPGGHLVTTVTLRLPSYMVGKREFSCVALEKEEVEQAVLDAGFDIEQLLHSPQSYSVTNAANNGVCFIVARKKPGP

SEQ ID NO: 25754 - protein, 74 aa, Artificial Sequence
  Synthetic polypeptide
VAVGGLQGDTLIDIGSGPTIYQVLAACDSFQDITLSDFTDRNREELEKWLKKEPGAYDWTPAVKFACELEGNRA

SEQ ID NO: 25755 - protein, 41 aa, Artificial Sequence
  Synthetic polypeptide
SPGRNWHLESGHLKLGKISCCRLTRWMVSWVPCGSRMWRMS

SEQ ID NO: 25756 - protein, 9 aa, Artificial Sequence
  Synthetic polypeptide
NLEKSVAAV

SEQ ID NO: 25757 - protein, 450 aa, Artificial Sequence
  Synthetic polypeptide
ATQILRALPGRQLPRWNALPEQCVAGPRGGSMWWLITRKELALGVRTSETWKNQLLPSDKVDGELGALRLEDVEDELIREEVILSPVPSVLKLQTASKPIDLSVAKEIKTLLFGSSFCCFNEEWKLQSFSFSNTASLKYGIVQNKGGPCGVLAAVQGCVLQKLLFEGDSKADCAQGLQPSDAHRTRCLVLALADIVWRAGGRERAVVALASRTQQFSPTGKYKADGVLETLTLHSLTCYEDLVTFLQQSIHQFEVGPYGCILLTLSAILSRSTELIRQDFDVPTSHLIGAHGYCTQELVNLLLTGKAVSNVFNDVVELDSGDGNITLLRGIAARSDIGFLSLFEHYNMCQVGCFLKTPRFPIWVVCSESHFSILFSLQPGLLRDWRTERLFDLYYYDGLANQQEQIRLTIDTTQTISEDTDNDLVPPLELCIRTKWKGASVNWNGSDPIL

SEQ ID NO: 25758 - protein, 18 aa, Artificial Sequence
  Synthetic polypeptide
GEAMTETPLSMCLWEKDS

SEQ ID NO: 25759 - protein, 18 aa, Artificial Sequence
  Synthetic polypeptide
GEAMTETPLSMCLWEKDS

SEQ ID NO: 25760 - protein, 14 aa, Artificial Sequence
  Synthetic polypeptide
HQMFKAREESEVKL

SEQ ID NO: 25761 - protein, 14 aa, Artificial Sequence
  Synthetic polypeptide
HQMFKAREESEVKL

SEQ ID NO: 25762 - protein, 206 aa, Artificial Sequence
  Synthetic polypeptide
RLNEIKYGNYLPECLALDKQLDADVSPKPTIFLPSIAETKLQKAGTYLCLLEKFFPDIIKIHWQEKKSNTILGSQEGNTMKTNDTYMKFSWLTVPEESLDKEHRCIVRHENNKNGIDQEIIFPPIKTDVTTVDPKYNYSKDANDVITMDPKDNWSKDANDTLLLQLTNTSAYYTYLLLLLKSVVYFAIITCCLLRRTAFCCNGEKS

SEQ ID NO: 25763 - protein, 77 aa, Artificial Sequence
  Synthetic polypeptide
MKLNMEITYQNAWHLINNLMQMFPPSPLFFFLRLLKQNSRRLEHTFVFLRNFSQILLRYIGKKRRATRFWDPRRGTP

SEQ ID NO: 25764 - protein, 190 aa, Artificial Sequence
  Synthetic polypeptide
RLNEIKYGNYLPECLALDKQLDADVSPKPTIFLPSIAETKLQKAGTYLCLLEKFFPDVIKIHWQEKKSNTILGSQEGNTMKTNDTYMKFSWLTVPEKSLDKEHRCIVRHENNKNGVDQEIIFPPIKTDVITMDPKDNCSKDANDTLLLQLTNTSAYYMYLLLLLKSVVYFAIITCCLLRRTAFCCNGEKS

SEQ ID NO: 25765 - protein, 77 aa, Artificial Sequence
  Synthetic polypeptide
MKLNMEITYQNAWHLINNLMQMFPPSPLFFFLQLLKQSSRRLEHTFVFLRNFSLMLLRYIGKKRRATRFWDPRRGTP

SEQ ID NO: 25766 - protein, 418 aa, Artificial Sequence
  Synthetic polypeptide
GRARWLTTVIPALWEAEAGRSQGSGVGVKKLCELQPEEKCCVVGTLFKAMPLQPSILREVSEEHNLLPQPPRSKYIHPDDELVLEDELQRIKLKGTIDVSKLVTGTVLAVFGSVRDDGKFLVEDYCFADLAPQKPAPPLDTDRFVLLVSGLGLGGGGGESLLGTQLLVDVVTGQLGDEGEQCSAAHVSRVILAGNLLSHSTQSRDSINKAKYLTKKTQAASVEAVKMLDEILLQLSASVPVDVMPGEFDPTNYTLPQQPLHPCMFPLATAYSTLQLVTNPYQATIDGVRFLGTSGQNVSDIFRYSSMEDHLEILEWTLRVRHISPTAPDTLGCYPFYKTDPFIFPECPHVYFCGNTPSFGSKIIRGPEDQTVLLVTVPDFSATQTACLVNLRSLACQPISFSGFGAEDDDLGGLGLGP

SEQ ID NO: 25767 - protein, 418 aa, Artificial Sequence; identical to SEQ ID NO: 25766
  Synthetic polypeptide

SEQ ID NO: 25768 - protein, 18 aa, Artificial Sequence
  Synthetic polypeptide
SQHFGRPRRADHKAVEWE

SEQ ID NO: 25769 - protein, 18 aa, Artificial Sequence
  Synthetic polypeptide
SQHFGRPRRADHKAVEWE

SEQ ID NO: 25770 - protein, 18 aa, Artificial Sequence
  Synthetic polypeptide
SQHFGRPRRADHKAVEWE

SEQ ID NO: 25771 - protein, 18 aa, Artificial Sequence
  Synthetic polypeptide
SQHFGRPRRADHKAVEWE

SEQ ID NO: 25772 - protein, 18 aa, Artificial Sequence
  Synthetic polypeptide
SQHFGRPRRADHKAVEWE

SEQ ID NO: 25773 - protein, 18 aa, Artificial Sequence
  Synthetic polypeptide
SQHFGRPRRADHKAVEWE

SEQ ID NO: 25774 - protein, 31 aa, Artificial Sequence
  Synthetic polypeptide
PGTVAHDCNPSTLGGRGGQITRQWSGSEEAV

SEQ ID NO: 25775 - protein, 31 aa, Artificial Sequence; identical to SEQ ID NO: 25774
  Synthetic polypeptide

SEQ ID NO: 25776 - protein, 31 aa, Artificial Sequence; identical to SEQ ID NO: 25774
  Synthetic polypeptide

SEQ ID NO: 25777 - protein, 31 aa, Artificial Sequence; identical to SEQ ID NO: 25774
  Synthetic polypeptide

SEQ ID NO: 25778 - protein, 31 aa, Artificial Sequence; identical to SEQ ID NO: 25774
  Synthetic polypeptide

SEQ ID NO: 25779 - protein, 31 aa, Artificial Sequence; identical to SEQ ID NO: 25774
  Synthetic polypeptide

SEQ ID NO: 25780 - protein, 404 aa, Artificial Sequence
  Synthetic polypeptide
GRARWLTTVIPALWEAEAGRSQGSGVGVKKLCELQPEEKCCVVGTLFKAMPLQPSILREVSEEHNLLPQPPRSKYIHPDDELVLEDELQRIKLKGTIDVSKLVTGTVLAVFGSVRDDGKFLVEDYCFADLAPQKPAPPLDTDRFVLLVSGLGLGGGGGESLLGTQLLVDVVTGQLGDEGEQCSAAHVSRVILAGNLLSHSTQSRDSINKAKYLTKKTQAASVEAVKMLDEILLQLSASVPVDVMPGEFDPTNYTLPQQPLHPCMFPLATAYSTLQLVTNPYQATIDGVRFLGTSGQNVSDIFRYSSMEDHLEILEWTLRVRHISPTAPDTLECPHVYFCGNTPSFGSKIIRGPEDQTVLLVTVPDFSATQTACLVNLRSLACQPISFSGFGAEDDDLGGLGLGP

SEQ ID NO: 25781 - protein, 169 aa, Artificial Sequence
  Synthetic polypeptide
GRARWLTTVIPALWEAEAGRSQGSGVGVKKLCELQPEEKCCVVGTLFKAMPLQPSILREVSEEHNLLPQPPRSKYIHPDDELVLEDELQRIKLKGTIDVSKLVTGTVLAVFGSVRDDGKFLVEDYCFADLAPQKPAPPLDTDRFVLLVSGLGLGGGGGESLLGTQLLVD

SEQ ID NO: 25782 - protein, 104 aa, Artificial Sequence
  Synthetic polypeptide
GRARWLTTVIPALWEAEAGRSQGSGVGVKKLCELQPEEKCCVVGTLFKAMPLQPSILREVSEEHNLLPQPPRSKYIHPDDELVLEDELQRIKLKGTIDVSKLVT

SEQ ID NO: 25783 - protein, 97 aa, Artificial Sequence
  Synthetic polypeptide
GRARWLTTVIPALWEAEAGRSQGSGVGVKKLCELQPEEKCCVVGTLFKAMPLQPSILREVSEEHNLLPQPPRSKYIHPDDELVLEDELQRIKLKGTI

SEQ ID NO: 25784 - protein, 26 aa, Artificial Sequence
  Synthetic polypeptide
DEEPPSLKLGPQKVIKIIKQNCTGMG

SEQ ID NO: 25785 - protein, 26 aa, Artificial Sequence
  Synthetic polypeptide
DEEPPSLKLGPQKVIKIIKQNCTGMG

SEQ ID NO: 25786 - protein, 26 aa, Artificial Sequence
  Synthetic polypeptide
DEEPPSLKLGPQKVIKIIKQNCTGMG

SEQ ID NO: 25787 - protein, 26 aa, Artificial Sequence
  Synthetic polypeptide
DEEPPSLKLGPQKVIKIIKQNCTGMG

SEQ ID NO: 25788 - protein, 26 aa, Artificial Sequence
  Synthetic polypeptide
DEEPPSLKLGPQKVIKIIKQNCTGMG

SEQ ID NO: 25789 - protein, 26 aa, Artificial Sequence
  Synthetic polypeptide
DEEPPSLKLGPQKVIKIIKQNCTGMG

SEQ ID NO: 25790 - protein, 26 aa, Artificial Sequence
  Synthetic polypeptide
DEEPPSLKLGPQKVIKIIKQNCTGMG

SEQ ID NO: 25791 - protein, 6 aa, Artificial Sequence
  Synthetic polypeptide
MRSLHH

SEQ ID NO: 25792 - protein, 6 aa, Artificial Sequence
  Synthetic polypeptide
MRSLHH

SEQ ID NO: 25793 - protein, 6 aa, Artificial Sequence
  Synthetic polypeptide
MRSLHH

SEQ ID NO: 25794 - protein, 6 aa, Artificial Sequence
  Synthetic polypeptide
MRSLHH

SEQ ID NO: 25795 - protein, 6 aa, Artificial Sequence
  Synthetic polypeptide
MRSLHH

SEQ ID NO: 25796 - protein, 6 aa, Artificial Sequence
  Synthetic polypeptide
MRSLHH

SEQ ID NO: 25797 - protein, 6 aa, Artificial Sequence
  Synthetic polypeptide
MRSLHH

SEQ ID NO: 25798 - protein, 69 aa, Artificial Sequence
  Synthetic polypeptide
GQPNTEGIWELVTGGVFYCLGMVFFKSDGRIPFAHAIWHLFVAFGAGTHYYAIWRYLYLPSTLQTKVSK

SEQ ID NO: 25799 - protein, 69 aa, Artificial Sequence; identical to SEQ ID NO: 25798
  Synthetic polypeptide

SEQ ID NO: 25800 - protein, 11 aa, Artificial Sequence
  Synthetic polypeptide
ASPTPRASGSW

SEQ ID NO: 25801 - protein, 11 aa, Artificial Sequence
  Synthetic polypeptide
ASPTPRASGSW

SEQ ID NO: 25802 - protein, 26 aa, Artificial Sequence
  Synthetic polypeptide
PAQHRGHLGAGDRRGLLLPGHGLLQE

SEQ ID NO: 25803 - protein, 26 aa, Artificial Sequence
  Synthetic polypeptide
PAQHRGHLGAGDRRGLLLPGHGLLQE

SEQ ID NO: 25804 - protein, 185 aa, Artificial Sequence
  Synthetic polypeptide
PSYPKSLIFLRCVHLHRPYRVKKRTDLTGAFRLDPTYLKHSHQDSGLITDYRHWQIPLGRRFRSLKMWFVFRMYGVKGLQAYIRKHVQLSHEFESLVRQDPRFEICVEVILGLVCFRLKGSNKVNEALLQRINSAKKIHLVPCHLRDKFVLRFAICSRTVESAHVQRAWEHIKELAADVLRAERE

SEQ ID NO: 25805 - protein, 185 aa, Artificial Sequence; identical to SEQ ID NO: 25804
  Synthetic polypeptide

SEQ ID NO: 25806 - protein, 185 aa, Artificial Sequence; identical to SEQ ID NO: 25804
  Synthetic polypeptide

SEQ ID NO: 25807 - protein, 185 aa, Artificial Sequence; identical to SEQ ID NO: 25804
  Synthetic polypeptide

SEQ ID NO: 25808 - protein, 185 aa, Artificial Sequence; identical to SEQ ID NO: 25804
  Synthetic polypeptide

SEQ ID NO: 25809 - protein, 20 aa, Artificial Sequence
  Synthetic polypeptide
HLIPKVLSFSVAFISTGHTG

SEQ ID NO: 25810 - protein, 20 aa, Artificial Sequence
  Synthetic polypeptide
HLIPKVLSFSVAFISTGHTG

SEQ ID NO: 25811 - protein, 20 aa, Artificial Sequence
  Synthetic polypeptide
HLIPKVLSFSVAFISTGHTG

SEQ ID NO: 25812 - protein, 20 aa, Artificial Sequence
  Synthetic polypeptide
HLIPKVLSFSVAFISTGHTG

SEQ ID NO: 25813 - protein, 20 aa, Artificial Sequence
  Synthetic polypeptide
HLIPKVLSFSVAFISTGHTG

SEQ ID NO: 25814 - protein, 30 aa, Artificial Sequence
  Synthetic polypeptide
ILSQKSYLSPLRSSPQAIQGEKENRLNGSL

SEQ ID NO: 25815 - protein, 30 aa, Artificial Sequence; identical to SEQ ID NO: 25814
  Synthetic polypeptide

SEQ ID NO: 25816 - protein, 30 aa, Artificial Sequence; identical to SEQ ID NO: 25814
  Synthetic polypeptide

SEQ ID NO: 25817 - protein, 30 aa, Artificial Sequence; identical to SEQ ID NO: 25814
  Synthetic polypeptide

SEQ ID NO: 25818 - protein, 30 aa, Artificial Sequence; identical to SEQ ID NO: 25814
  Synthetic polypeptide

SEQ ID NO: 25819 - protein, 34 aa, Artificial Sequence
  Synthetic polypeptide
PSYPKSLIFLRCVHLHRPYSLQIHSTLIPTNGYW

SEQ ID NO: 25820 - protein, 34 aa, Artificial Sequence; identical to SEQ ID NO: 25819
  Synthetic polypeptide

SEQ ID NO: 25821 - protein, 34 aa, Artificial Sequence; identical to SEQ ID NO: 25819
  Synthetic polypeptide

SEQ ID NO: 25822 - protein, 34 aa, Artificial Sequence; identical to SEQ ID NO: 25819
  Synthetic polypeptide

SEQ ID NO: 25823 - protein, 34 aa, Artificial Sequence; identical to SEQ ID NO: 25819
  Synthetic polypeptide

SEQ ID NO: 25824 - protein, 34 aa, Artificial Sequence; identical to SEQ ID NO: 25819
  Synthetic polypeptide

SEQ ID NO: 25825 - protein, 26 aa, Artificial Sequence
  Synthetic polypeptide
HLIPKVLSFSVAFISTGHTVCRFIQL

SEQ ID NO: 25826 - protein, 26 aa, Artificial Sequence
  Synthetic polypeptide
HLIPKVLSFSVAFISTGHTVCRFIQL

SEQ ID NO: 25827 - protein, 26 aa, Artificial Sequence
  Synthetic polypeptide
HLIPKVLSFSVAFISTGHTVCRFIQL

SEQ ID NO: 25828 - protein, 26 aa, Artificial Sequence
  Synthetic polypeptide
HLIPKVLSFSVAFISTGHTVCRFIQL

SEQ ID NO: 25829 - protein, 26 aa, Artificial Sequence
  Synthetic polypeptide
HLIPKVLSFSVAFISTGHTVCRFIQL

SEQ ID NO: 25830 - protein, 26 aa, Artificial Sequence
  Synthetic polypeptide
HLIPKVLSFSVAFISTGHTVCRFIQL

SEQ ID NO: 25831 - protein, 26 aa, Artificial Sequence
  Synthetic polypeptide
HLIPKVLSFSVAFISTGHTVCRFIQL

SEQ ID NO: 25832 - protein, 207 aa, Artificial Sequence
  Synthetic polypeptide
ILSQKSYLSPLRSSPQAIQFADSFNFNPHKWLLVNFDCSAMWVKKRTDLTGAFRLDPTYLKHSHQDSGLITDYRHWQIPLGRRFRSLKMWFVFRMYGVKGLQAYIRKHVQLSHEFESLVRQDPRFEICVEVILGLVCFRLKGSNKVNEALLQRINSAKKIHLVPCHLRDKFVLRFAICSRTVESAHVQRAWEHIKELAADVLRAERE

SEQ ID NO: 25833 - protein, 207 aa, Artificial Sequence; identical to SEQ ID NO: 25832
  Synthetic polypeptide

SEQ ID NO: 25834 - protein, 207 aa, Artificial Sequence; identical to SEQ ID NO: 25832
  Synthetic polypeptide

SEQ ID NO: 25835 - protein, 207 aa, Artificial Sequence; identical to SEQ ID NO: 25832
  Synthetic polypeptide

SEQ ID NO: 25836 - protein, 207 aa, Artificial Sequence; identical to SEQ ID NO: 25832
  Synthetic polypeptide

SEQ ID NO: 25837 - protein, 65 aa, Artificial Sequence
  Synthetic polypeptide
ILSQKSYLSPLRSSPQAIQFADSFNFNPHKWLLVNFDCSAMWSRQPVRMLRLKKTCLVSAVVRRS

SEQ ID NO: 25838 - protein, 27 aa, Artificial Sequence
  Synthetic polypeptide
PSYPKSLIFLRCVHLHRPYSLQIHSTL

SEQ ID NO: 25839 - protein, 26 aa, Artificial Sequence
  Synthetic polypeptide
ILSQKSYLSPLRSSPQAIQFADSFNF

SEQ ID NO: 25840 - protein, 36 aa, Artificial Sequence
  Synthetic polypeptide
PSYPKSLIFLRCVHLHRPYRWLPPWGPQHAAPLTIS

SEQ ID NO: 25841 - protein, 36 aa, Artificial Sequence; identical to SEQ ID NO: 25840
  Synthetic polypeptide

SEQ ID NO: 25842 - protein, 36 aa, Artificial Sequence; identical to SEQ ID NO: 25840
  Synthetic polypeptide

SEQ ID NO: 25843 - protein, 36 aa, Artificial Sequence; identical to SEQ ID NO: 25840
  Synthetic polypeptide

SEQ ID NO: 25844 - protein, 36 aa, Artificial Sequence; identical to SEQ ID NO: 25840
  Synthetic polypeptide

SEQ ID NO: 25845 - protein, 36 aa, Artificial Sequence; identical to SEQ ID NO: 25840
  Synthetic polypeptide

SEQ ID NO: 25846 - protein, 36 aa, Artificial Sequence; identical to SEQ ID NO: 25840
  Synthetic polypeptide

SEQ ID NO: 25847 - protein, 32 aa, Artificial Sequence
  Synthetic polypeptide
HLIPKVLSFSVAFISTGHTDGCHPGDHNMLLL

SEQ ID NO: 25848 - protein, 32 aa, Artificial Sequence; identical to SEQ ID NO: 25847
  Synthetic polypeptide

SEQ ID NO: 25849 - protein, 32 aa, Artificial Sequence; identical to SEQ ID NO: 25847
  Synthetic polypeptide

SEQ ID NO: 25850 - protein, 32 aa, Artificial Sequence; identical to SEQ ID NO: 25847
  Synthetic polypeptide

SEQ ID NO: 25851 - protein, 32 aa, Artificial Sequence; identical to SEQ ID NO: 25847
  Synthetic polypeptide

SEQ ID NO: 25852 - protein, 32 aa, Artificial Sequence; identical to SEQ ID NO: 25847
  Synthetic polypeptide

SEQ ID NO: 25853 - protein, 32 aa, Artificial Sequence; identical to SEQ ID NO: 25847
  Synthetic polypeptide

SEQ ID NO: 25854 - protein, 261 aa, Artificial Sequence
  Synthetic polypeptide
ILSQKSYLSPLRSSPQAIQMVATLGTTTCCSFDNLLEVGPICNKEDIWLHVDAAYAGSAFICPEFRHLLNGVEFADSFNFNPHKWLLVNFDCSAMWVKKRTDLTGAFRLDPTYLKHSHQDSGLITDYRHWQIPLGRRFRSLKMWFVFRMYGVKGLQAYIRKHVQLSHEFESLVRQDPRFEICVEVILGLVCFRLKGSNKVNEALLQRINSAKKIHLVPCHLRDKFVLRFAICSRTVESAHVQRAWEHIKELAADVLRAERE

SEQ ID NO: 25855 - protein, 261 aa, Artificial Sequence; identical to SEQ ID NO: 25854
  Synthetic polypeptide

SEQ ID NO: 25856 - protein, 261 aa, Artificial Sequence; identical to SEQ ID NO: 25854
  Synthetic polypeptide

SEQ ID NO: 25857 - protein, 261 aa, Artificial Sequence; identical to SEQ ID NO: 25854
  Synthetic polypeptide

SEQ ID NO: 25858 - protein, 261 aa, Artificial Sequence; identical to SEQ ID NO: 25854
  Synthetic polypeptide

SEQ ID NO: 25859 - protein, 48 aa, Artificial Sequence
  Synthetic polypeptide
ILSQKSYLSPLRSSPQAIQMVATLGTTTCCSFDNLLEVGPIFCRFIQL

SEQ ID NO: 25860 - protein, 119 aa, Artificial Sequence
  Synthetic polypeptide
ILSQKSYLSPLRSSPQAIQMVATLGTTTCCSFDNLLEVGPICNKEDIWLHVDAAYAGSAFICPEFRHLLNGVEFADSFNFNPHKWLLVNFDCSAMWSRQPVRMLRLKKTCLVSAVVRRS

SEQ ID NO: 25861 - protein, 439 aa, Artificial Sequence
  Synthetic polypeptide
LTCVETPGRHSSQDVKVFSEDGTSKVVEILADMTARDLCQLLVYKSHCVDDNSWTLVEHHPHLGLERCLEDHELVVQVESTMASESKFLFRKNYAKYEFFKNPMNFFPEQMVTWCQQSNGSQTQLLQNFLNSSSCPEIQGFLHVKELGKKSWKKLYVCLRRSGLYCSTKGTSKEPRHLQLLADLEDSNIFSLIAGRKQYNAPTDHGLCIKPNKVRNETKELRLLCAEDEQTRTCWMTAFRLLKYGMLLYQNYRIPQQRKALLSPFSTPVRSVSENSLVAMDFSGQTGRVIENPAEAQSAALEEGHAWRKRSTRMNILGSQSPLHPSTLSTVIHRTQHWFHGRISREESHRIIKQQGLVDGLFLLRDSQSNPKAFVLTLCHHQKIKNFQILPCEDDGQTFFSLDDGNTKFSDLIQLVDFYQLNKGVLPCKLKHHCIRVAL

SEQ ID NO: 25862 - protein, 439 aa, Artificial Sequence; identical to SEQ ID NO: 25861
  Synthetic polypeptide

SEQ ID NO: 25863 - protein, 439 aa, Artificial Sequence; identical to SEQ ID NO: 25861
  Synthetic polypeptide

SEQ ID NO: 25864 - protein, 439 aa, Artificial Sequence; identical to SEQ ID NO: 25861
  Synthetic polypeptide

SEQ ID NO: 25865 - protein, 439 aa, Artificial Sequence; identical to SEQ ID NO: 25861
  Synthetic polypeptide

SEQ ID NO: 25866 - protein, 439 aa, Artificial Sequence; identical to SEQ ID NO: 25861
  Synthetic polypeptide

SEQ ID NO: 25867 - protein, 439 aa, Artificial Sequence; identical to SEQ ID NO: 25861
  Synthetic polypeptide

SEQ ID NO: 25868 - protein, 439 aa, Artificial Sequence; identical to SEQ ID NO: 25861
  Synthetic polypeptide

SEQ ID NO: 25869 - protein, 439 aa, Artificial Sequence; identical to SEQ ID NO: 25861
  Synthetic polypeptide

SEQ ID NO: 25870 - protein, 439 aa, Artificial Sequence; identical to SEQ ID NO: 25861
  Synthetic polypeptide

SEQ ID NO: 25871 - protein, 34 aa, Artificial Sequence
  Synthetic polypeptide
GENNNLRVWKHLADTLPRMLKSLVKMGQAKWWRF

SEQ ID NO: 25872 - protein, 34 aa, Artificial Sequence; identical to SEQ ID NO: 25871
  Synthetic polypeptide

SEQ ID NO: 25873 - protein, 34 aa, Artificial Sequence; identical to SEQ ID NO: 25871
  Synthetic polypeptide

SEQ ID NO: 25874 - protein, 34 aa, Artificial Sequence; identical to SEQ ID NO: 25871
  Synthetic polypeptide

SEQ ID NO: 25875 - protein, 34 aa, Artificial Sequence; identical to SEQ ID NO: 25871
  Synthetic polypeptide

SEQ ID NO: 25876 - protein, 34 aa, Artificial Sequence; identical to SEQ ID NO: 25871
  Synthetic polypeptide

SEQ ID NO: 25877 - protein, 34 aa, Artificial Sequence; identical to SEQ ID NO: 25871
  Synthetic polypeptide

SEQ ID NO: 25878 - protein, 34 aa, Artificial Sequence; identical to SEQ ID NO: 25871
  Synthetic polypeptide

SEQ ID NO: 25879 - protein, 34 aa, Artificial Sequence; identical to SEQ ID NO: 25871
  Synthetic polypeptide

SEQ ID NO: 25880 - protein, 34 aa, Artificial Sequence; identical to SEQ ID NO: 25871
  Synthetic polypeptide

SEQ ID NO: 25881 - protein, 34 aa, Artificial Sequence; identical to SEQ ID NO: 25871
  Synthetic polypeptide

SEQ ID NO: 25882 - protein, 19 aa, Artificial Sequence
  Synthetic polypeptide
GKIITYVCGNTWQTLFPGC

SEQ ID NO: 25883 - protein, 19 aa, Artificial Sequence
  Synthetic polypeptide
GKIITYVCGNTWQTLFPGC

SEQ ID NO: 25884 - protein, 19 aa, Artificial Sequence
  Synthetic polypeptide
GKIITYVCGNTWQTLFPGC

SEQ ID NO: 25885 - protein, 19 aa, Artificial Sequence
  Synthetic polypeptide
GKIITYVCGNTWQTLFPGC

SEQ ID NO: 25886 - protein, 19 aa, Artificial Sequence
  Synthetic polypeptide
GKIITYVCGNTWQTLFPGC

SEQ ID NO: 25887 - protein, 19 aa, Artificial Sequence
  Synthetic polypeptide
GKIITYVCGNTWQTLFPGC

SEQ ID NO: 25888 - protein, 19 aa, Artificial Sequence
  Synthetic polypeptide
GKIITYVCGNTWQTLFPGC

SEQ ID NO: 25889 - protein, 19 aa, Artificial Sequence
  Synthetic polypeptide
GKIITYVCGNTWQTLFPGC

SEQ ID NO: 25890 - protein, 19 aa, Artificial Sequence
  Synthetic polypeptide
GKIITYVCGNTWQTLFPGC

SEQ ID NO: 25891 - protein, 19 aa, Artificial Sequence
  Synthetic polypeptide
GKIITYVCGNTWQTLFPGC

SEQ ID NO: 25892 - protein, 19 aa, Artificial Sequence
  Synthetic polypeptide
GKIITYVCGNTWQTLFPGC

SEQ ID NO: 25893 - protein, 393 aa, Artificial Sequence
  Synthetic polypeptide
LTCVETPGRHSSQDVKVFSEDGTSKVVEILADMTARDLCQLLVYKSHCVDDNSWTLVEHHPHLGLERCLEDHELVVQVESTMASESKFLFRKNYAKYEFFKNPMNFFPEQMVTWCQQSNGSQTQLLQEPRHLQLLADLEDSNIFSLIAGRKQYNAPTDHGLCIKPNKVRNETKELRLLCAEDEQTRTCWMTAFRLLKYGMLLYQNYRIPQQRKALLSPFSTPVRSVSENSLVAMDFSGQTGRVIENPAEAQSAALEEGHAWRKRSTRMNILGSQSPLHPSTLSTVIHRTQHWFHGRISREESHRIIKQQGLVDGLFLLRDSQSNPKAFVLTLCHHQKIKNFQILPCEDDGQTFFSLDDGNTKFSDLIQLVDFYQLNKGVLPCKLKHHCIRVAL

SEQ ID NO: 25894 - protein, 8 aa, Artificial Sequence
  Synthetic polypeptide
NSRSPAGG

SEQ ID NO: 25895 - protein, 8 aa, Artificial Sequence
  Synthetic polypeptide
NSRSPAGG

SEQ ID NO: 25896 - protein, 8 aa, Artificial Sequence
  Synthetic polypeptide
NSRSPAGG

SEQ ID NO: 25897 - protein, 8 aa, Artificial Sequence
  Synthetic polypeptide
NSRSPAGG

SEQ ID NO: 25898 - protein, 8 aa, Artificial Sequence
  Synthetic polypeptide
NSRSPAGG

SEQ ID NO: 25899 - protein, 8 aa, Artificial Sequence
  Synthetic polypeptide
NSRSPAGG

SEQ ID NO: 25900 - protein, 559 aa, Artificial Sequence
  Synthetic polypeptide
KGAIRTHGVQQEDDVDLEALVNDMNASLESLYSACSMQSDTVPLLQNGQHARSQPRASGPPRSIQPQVSPRQRVQRSQPVHILAVRRLQEEDQQFRTSSLPAIPNPFPELCGPGSPPVLTPGSLPPSQAAAKQDVKVFSEDGTSKVVEILADMTARDLCQLLVYKSHCVDDNSWTLVEHHPHLGLERCLEDHELVVQVESTMASESKFLFRKNYAKYEFFKNPMNFFPEQMVTWCQQSNGSQTQLLQNFLNSSSCPEIQGFLHVKELGKKSWKKLYVCLRRSGLYCSTKGTSKEPRHLQLLADLEDSNIFSLIAGRKQYNAPTDHGLCIKPNKVRNETKELRLLCAEDEQTRTCWMTAFRLLKYGMLLYQNYRIPQQRKALLSPFSTPVRSVSENSLVAMDFSGQTGRVIENPAEAQSAALEEGHAWRKRSTRMNILGSQSPLHPSTLSTVIHRTQHWFHGRISREESHRIIKQQGLVDGLFLLRDSQSNPKAFVLTLCHHQKIKNFQILPCEDDGQTFFSLDDGNTKFSDLIQLVDFYQLNKGVLPCKLKHHCIRVAL

SEQ ID NO: 25901 - protein, 559 aa, Artificial Sequence; identical to SEQ ID NO: 25900
  Synthetic polypeptide

SEQ ID NO: 25902 - protein, 559 aa, Artificial Sequence; identical to SEQ ID NO: 25900
  Synthetic polypeptide

SEQ ID NO: 25903 - protein, 559 aa, Artificial Sequence; identical to SEQ ID NO: 25900
  Synthetic polypeptide

SEQ ID NO: 25904 - protein, 20 aa, Artificial Sequence
  Synthetic polypeptide
KEPLELTESSRRMMWTWKPW

SEQ ID NO: 25905 - protein, 20 aa, Artificial Sequence
  Synthetic polypeptide
KEPLELTESSRRMMWTWKPW

SEQ ID NO: 25906 - protein, 20 aa, Artificial Sequence
  Synthetic polypeptide
KEPLELTESSRRMMWTWKPW

SEQ ID NO: 25907 - protein, 20 aa, Artificial Sequence
  Synthetic polypeptide
KEPLELTESSRRMMWTWKPW

SEQ ID NO: 25908 - protein, 20 aa, Artificial Sequence
  Synthetic polypeptide
KEPLELTESSRRMMWTWKPW

SEQ ID NO: 25909 - protein, 20 aa, Artificial Sequence
  Synthetic polypeptide
KEPLELTESSRRMMWTWKPW

SEQ ID NO: 25910 - protein, 513 aa, Artificial Sequence
  Synthetic polypeptide
KGAIRTHGVQQEDDVDLEALVNDMNASLESLYSACSMQSDTVPLLQNGQHARSQPRASGPPRSIQPQVSPRQRVQRSQPVHILAVRRLQEEDQQFRTSSLPAIPNPFPELCGPGSPPVLTPGSLPPSQAAAKQDVKVFSEDGTSKVVEILADMTARDLCQLLVYKSHCVDDNSWTLVEHHPHLGLERCLEDHELVVQVESTMASESKFLFRKNYAKYEFFKNPMNFFPEQMVTWCQQSNGSQTQLLQEPRHLQLLADLEDSNIFSLIAGRKQYNAPTDHGLCIKPNKVRNETKELRLLCAEDEQTRTCWMTAFRLLKYGMLLYQNYRIPQQRKALLSPFSTPVRSVSENSLVAMDFSGQTGRVIENPAEAQSAALEEGHAWRKRSTRMNILGSQSPLHPSTLSTVIHRTQHWFHGRISREESHRIIKQQGLVDGLFLLRDSQSNPKAFVLTLCHHQKIKNFQILPCEDDGQTFFSLDDGNTKFSDLIQLVDFYQLNKGVLPCKLKHHCIRVAL

SEQ ID NO: 25911 - protein, 85 aa, Artificial Sequence
  Synthetic polypeptide
KGAIRTHGVQQEDDVDLEALVNDMNASLESLYSACSMQSDTVPLLQNGQHARSQPRASGPPRSIQPQVSPRQRVQRSQPVHILAV

SEQ ID NO: 25912 - protein, 54 aa, Artificial Sequence
  Synthetic polypeptide
RPAWATQEHHDRVLHVRADAGVRRGLLHLQPHPRRSRQLPARLHRQWFHPRRPL

SEQ ID NO: 25913 - protein, 54 aa, Artificial Sequence; identical to SEQ ID NO: 25912
  Synthetic polypeptide

SEQ ID NO: 25914 - protein, 54 aa, Artificial Sequence; identical to SEQ ID NO: 25912
  Synthetic polypeptide

SEQ ID NO: 25915 - protein, 80 aa, Artificial Sequence
  Synthetic polypeptide
AGHSGSYLQSQHFGRAKRVDHLSPGVKDQPGQHRNTMTVSYMSGLTLGSAVAYCTYSLTRDAHGSCLHASTANGSILAGL

SEQ ID NO: 25916 - protein, 80 aa, Artificial Sequence; identical to SEQ ID NO: 25915
  Synthetic polypeptide

SEQ ID NO: 25917 - protein, 80 aa, Artificial Sequence; identical to SEQ ID NO: 25915
  Synthetic polypeptide

SEQ ID NO: 25918 - protein, 14 aa, Artificial Sequence
  Synthetic polypeptide
AQELKTSLGNTGTP

SEQ ID NO: 25919 - protein, 14 aa, Artificial Sequence
  Synthetic polypeptide
AQELKTSLGNTGTP

SEQ ID NO: 25920 - protein, 14 aa, Artificial Sequence
  Synthetic polypeptide
AQELKTSLGNTGTP

SEQ ID NO: 25921 - protein, 2861 aa, Artificial Sequence
  Synthetic polypeptide
STQHCIPGFSHLPSGLYPSYLHLNHLEPPSSGSPLLSQLGQPSIFDTQKGQGPGGDGFYLPTAGAPGSLHSHAPSARTPGGGHSSGAPAKGSSSRDGPAKERAGRGGEPPPLFGKKDPRARGEEASGPRGVVDLTQEARAEGRQDRGPPRLAERLSPFLAESKTKNAALQPSVLTMCNGGAGDVGLPALVAEAGRGGAKEAARQDEGARLLRRTETLLPGPRPCPSPLPPPPAPPKGPPAPPAATPAGVYTVFREQGREHRVVAPTFVPSVEAFDERPGPIQIASQARDARAREREAGRPGVLQAPPGSPRPLDRPEGLREKNSVIRSLKRPPPADAPTVRATRASPDPRAYVPAKELLKPEADPRPCERAPRGPAGPAAQQAAKLFGLEPGRPPPTGPEHKWKPFELGNFAATQMAVLAAQHHHSRAEEEAAVVAASSSKKAYLDPGAVLPRSAATCGRPVADMHSAAHGSGEASAMQSLIKYSGSFARDAVAVRPGGCGKKSPFGGLGTMKPEPAPTSAGASRAQARLPHSGGPAAGGGRQLKRDPERPESAKAFGREGSGAQGEAEVRHPPVGIAVAVARQKDSGGSGRLGPGLVDQERSLSLSNVKGHGRADEDCVDDRARHREERLLGARLDRDQEKLLRESKELADLARLHPTSCAPNGLNPNLMVTGGPALAGSGRWSADPAAHLATHPWLPRSGNASMWLAGHPYGLGPPSLHQGMAPAFPPGLGGSLPSAYQFVRDPQSGQLVVIPSDHLPHFAELMERATVPPLWPALYPPGRSPLHHAQQLQLFSQQHFLRQQEFLYLQQQAAQALELQRSAQLVQERLKAQEHRAEMEEKGSKRGLEAAGKAGLATAGPGLLPRKPPGLAAGPAGTYGKAVSPPPSPRASPVAALKAKVIQKLEDVSKPPAYAYPATPSSHPTSPPPASPPPTPGITRKEEAPENVVEKKDLELEKEAPSPFQALFSDIPPRYPFQALPPHYGRPYPFLLQPTAAADADGLAPDVPLPADGPERLALSPEDKPIRLSPSKITEPLREGPEEEPLAEREVKAEVEDMDEGPTELPPLESPLPLPAAEAMATPSPAGGCGGGLLEAQALSATGQSCAEPSECPDFVEGPEPRVDSPGRTEPCTAALDLGVQLTPETLVEAKEEPVEVPVAVPVVEAVPEEGLAQVAPSESQPTLEMSDCDVPAGEGQCPSLEPQEAVPVLGSTCFLEEASSDQFLPSLEDPLAGMNALAAAAELPQARPLPSPGAAGAQALEKLEAAESLVLEQSFLHGITLLSEIAELELERRSQEMGGAERALVARPSLESLLAAGSHMLREVLDGPVVDPLKNLRLPRELKPNKKYSWMRKKEERMYAMKSSLEDMDALELDFRMRLAEVQRQYKEKQRELVKLQRRRDSEDRREEPHRSLARRGPGRPRKRTHAPSALSPPRKRGKSGHSSGKLSSKSLLTSDDYELGAGIRKRHKGSEEEHDALIGMGKARGRNQTWDEHEASSDFISQLKIKKKKMASDQEQLASKLDKALSLTKQDKLKSPFKFSDSAGGKSKTSGGCGRYLTPYDSLLGKNRKALAKGLGLSLKSSREGKHKRAAKTRKMEVGFKARGQPKSAHSPFASEVSSYSYNTDSEEDEEFLKDEWPAQGPSSSKLTPSLLCSMVAKNSKAAGGPKLTKRGLAAPRTLKPKPATSRKQPFCLLLREAEARSSFSDSSEESFDQDESSEEEDEEEELEEEDEASGGGYRLGARERALSPGLEESGLGLLARFAASALPSPTVGPSLSVVQLEAKQKARKKEERQSLLGTEFEYTDSESEVKVRKRSPAGLLRPKKGLGEPGPSLAAPTPGARGPDPSSPDKAKLAVEKGRKARKLRGPKEPGFEAGPEASDDDLWTRRRSERIFLHDASAAAPAPVSTAPATKTSRCAKGGPLSPRKDAGRAKDRKDPRKKKKGKEAGPGAGLPPPRAPALPSEARAPHASSLTAAKRSKAKAKGKEVKKENRGKGGAVSKLMESMAAEEDFEPNQDSSFSEDEHLPRGGAVERPLTPAPRSCIIDKDELKDGLRVLIPMDDKLLYAGHVQTVHSPDIYRVVVEGERGNRPHIYCLEQLLQEAIIDVRPASTRFLPQGTRIAAYWSQQYRCLYPGTVVRGLLDLEDDGDLITVEFDDGDTGRIPLSHIRLLPPDYKIQCAEPSPALLVPSAKRRSRKTSKDTGEGKDGGTAGSEEPGAKARGRGRKPSAKAKGGRAATLEEGNPTDEVPSTPLALEPSSTPGSKKSPPEPVDKRAKAPKARPAPPQPSPAPPAFTSCPAPEPFAELPAPATSLAPAPLITMPATRPKPKKARAAEESGAKGPRRPGEEAELLVKLDHEGVTSPKSKKAKEALLLREDPGAGGWQEPKSLLSLGSYPPAAGSSEPKAPWPKATDGDLAQEPGPGLTFEDSGNPKSPDKAQAEQDGAEESESSSSSSSGSSSSSSSSSSSGSETEGEEEGDKNGDGGCGTGGRNCSAASSRAASPASSSSSSSSSSSSSSSSSSSSSSSSSSSSSSSSSSSSSSSSSSSSSSSSSSSSSSSSSSTTDEDSSCSSDDEAAPAPTAGPSAQAALPTKATKQAGKARPSAHSPGKKTPAPQPQAPPPQPTQPLQPKAQAGAKSRPKKREGVHLPTTKELAKRQRLPSVENRPKIAAFLPARQLWKWFGKPTQRRGMKGKARKLFYKAIVRGKEMIRIGDCAVFLSAGRPNLPYIGRIQSMWESWGNNMVVRVKWFYHPEETSPGKQFHQGQHWDQKSSRSLPAALRVSSQRKDFMERALYQSSHVDENDVQTVSHKCLVVGLEQYEQMLKTKKYQDSEGLYYLAGTYEPTTGMIFSTDGVPVLC

SEQ ID NO: 25922 - protein, 24 aa, Artificial Sequence
  Synthetic polypeptide
CDLLSTVSLASPTCPVGCTHPTST

SEQ ID NO: 25923 - protein, 24 aa, Artificial Sequence
  Synthetic polypeptide
CDLLSTVSLASPTCPVGCTHPTST

SEQ ID NO: 25924 - protein, 24 aa, Artificial Sequence
  Synthetic polypeptide
CDLLSTVSLASPTCPVGCTHPTST

SEQ ID NO: 25925 - protein, 24 aa, Artificial Sequence
  Synthetic polypeptide
CDLLSTVSLASPTCPVGCTHPTST

SEQ ID NO: 25926 - protein, 160 aa, Artificial Sequence
  Synthetic polypeptide
ALSSGPSVIYSALYPWLLPPAQWAVPILPPPEPPGAPQQWEPPPQPAGSAQHFRYPERSGARRRRFLPAHRGGSGLPALSRALGPDPWRRPLLGRPGQRLVVAGRSSQGAGGPRRGAASAFRQEGPARPGRGGLGATGRGGPDPGGARRGPPGPGAPAPG

SEQ ID NO: 25927 - protein, 160 aa, Artificial Sequence; identical to SEQ ID NO: 25926
  Synthetic polypeptide

SEQ ID NO: 25928 - protein, 2861 aa, Artificial Sequence
  Synthetic polypeptide
STQHCIPGFSHLPSGLYPSYLHLNHLEPPSSGSPLLSQLGQPSIFDTQKGQGPGGDGFYLPTAGAPGSLHSHAPSARTPGGGHSSGAPAKGSSSRDGPAKERAGRGGEPPPLFGKKDPRARGEEASGPRGVVDLTQEARAEGRQDRGPPRLAERLSPFLAESKTKNAALQPSVLTMCNGGAGDVGLPALVAEAGRGGAKEAARQDEGARLLRRTETLLPGPRPCPSPLPPPPAPPKGPPAPPAATPAGVYTVFREQGREHRVVAPTFVPSVEAFDERPGPIQIASQARDARAREREAGRPGVLQAPPGSPRPLDRPEGLREKNSVIRSLKRPPPADAPTVRATRASPDPRAYVPAKELLKPEADPRPCERAPRGPAGPAAQQAAKLFGLEPGRPPPTGPEHKWKPFELGNFAATQMAVLAAQHHHSRAEEEAAVVAASSSKKAYLDPGAVLPRSAATCGRPVADMHSAAHGSGEASAMQSLIKYSGSFARDAVAVRPGGCGKKSPFGGLGTMKPEPAPTSAGASRAQARLPHSGGPAAGGGRQLKRDPERPESAKAFGREGSGAQGEAEVRHPPVGIAVAVARQKDSGGSGRLGPGLVDQERSLSLSNVKGHGRADEDCVDDRARHREERLLGARLDRDQEKLLRESKELADLARLHPTSCAPNGLNPNLMVTGGPALAGSGRWSADPAAHLATHPWLPRSGNASMWLAGHPYGLGPPSLHQGMAPAFPPGLGGSLPSAYQFVRDPQSGQLVVIPSDHLPHFAELMERATVPPLWPALYPPGRSPLHHAQQLQLFSQQHFLRQQEFLYLQQQAAQALELQRSAQLVQERLKAQEHRAEMEEKGSKRGLEAAGKAGLATAGPGLLPRKPPGLAAGPAGTYGKAVSPPPSPRASPVAALKAKVIQKLEDVSKPPAYAYPATPSSHPTSPPPASPPPTPGITRKEEAPENVVEKKDLELEKEAPSPFQALFSDIPPRYPFQALPPHYGRPYPFLLQPTAAADADGLAPDVPLPADGPERLALSPEDKPIRLSPSKITEPLREGPEEEPLAEREVKAEVEDMDEGPTELPPLESPLPLPAAEAMATPSPAGGCGGGLLEAQALSATGQSCAEPSECPDFVEGPEPRVDSPGRTEPCTAALDLGVQLTPETLVEAKEEPVEVPVAVPVVEAVPEEGLAQVAPSESQPTLEMSDCDVPAGEGQCPSLEPQEAVPVLGSTCFLEEASSDQFLPSLEDPLAGMNALAAAAELPQARPLPSPGAAGAQALEKLEAAESLVLEQSFLHGITLLSEIAELELERRSQEMGGAERALVARPSLESLLAAGSHMLREVLDGPVVDPLKNLRLPRELKPNKKYSWMRKKEERMYAMKSSLEDMDALELDFRMRLAEVQRQYKEKQRELVKLQRRRDSEDRREEPHRSLARRGPGRPRKRTHAPSALSPPRKRGKSGHSSGKLSSKSLLTSDDYELGAGIRKRHKGSEEEHDALIGMGKARGRNQTWDEHEASSDFISQLKIKKKKMASDQEQLASKLDKALSLTKQDKLKSPFKFSDSAGGKSKTSGGCGRYLTPYDSLLGKNRKALAKGLGLSLKSSREGKHKRAAKTRKMEVGFKARGQPKSAHSPFASEVSSYSYNTDSEEDEEFLKDEWPAQGPSSSKLTPSLLCSMVAKNSKAAGGPKLTKRGLAAPRTLKPKPATSRKQPFCLLLREAEARSSFSDSSEESFDQDESSEEEDEEEELEEEDEASGGGYRLGARERALSPGLEESGLGLLARFAASALPSPTVGPSLSVVQLEAKQKARKKEERQSLLGTEFEYTDSESEVKVRKRSPAGLLRPKKGLGEPGPSLAAPTPGARGPDPSSPDKAKLAVEKGRKARKLRGPKEPGFEAGPEASDDDLWTRRRSERIFLHDASAAAPAPVSTAPATKTSRCAKGGPLSPRKDAGRAKDRKDPRKKKKGKEAGPGAGLPPPRAPALPSEARAPHASSLTAAKRSKAKAKGKEVKKENRGKGGAVSKLMESMAAEEDFEPNQDSSFSEDEHLPRGGAVERPLTPAPRSCIIDKDELKDGLRVLIPMDDKLLYAGHVQTVHSPDIYRVVVEGERGNRPHIYCLEQLLQEAIIDVRPASTRFLPQGTRIAAYWSQQYRCLYPGTVVRGLLDLEDDGDLITVEFDDGDTGRIPLSHIRLLPPDYKIQCAEPSPALLVPSAKRRSRKTSKDTGEGKDGGTAGSEEPGAKARGRGRKPSAKAKGDRAATLEEGNPTDEVPSTPLALEPSSTPGSKKSPPEPVDKRAKAPKARPAPPQPSPAPPAFTSCPAPEPFAELPAPATSLAPAPLITMPATRPKPKKARAAEESGAKGPRRPGEEAELLVKLDHEGVTSPKSKKAKEALLLREDPGAGGWQEPKSLLSLGSYPPAAGSSEPKAPWPKATDGDLAQEPGPGLTFEDSGNPKSPDKAQAEQDGAEESESSSSSSSGSSSSSSSSSSSGSETEGEEEGDKNGDGGCGTGGRNCSAASSRAASPASSSSSSSSSSSSSSSSSSSSSSSSSSSSSSSSSSSSSSSSSSSSSSSSSSSSSSSSSSTTDEDSSCSSDDEAAPAPTAGPSAQAALPTKATKQAGKARPSAHSPGKKTPAPQPQAPPPQPTQPLQPKAQAGAKSRPKKREGVHLPTTKELAKRQRLPSVENRPKIAAFLPARQLWKWFGKPTQRRGMKGKARKLFYKAIVRGKEMIRIGDCAVFLSAGRPNLPYIGRIQSMWESWGNNMVVRVKWFYHPEETSPGKQFHQGQHWDQKSSRSLPAALRVSSQRKDFMERALYQSSHVDENDVQTVSHKCLVVGLEQYEQMLKTKKYQDSEGLYYLAGTYEPTTGMIFSTDGVPVLC

SEQ ID NO: 25929 - protein, 66 aa, Artificial Sequence
  Synthetic polypeptide
STQHCIPGFSHLPSGLYPSYLHLNHLEPPSSGSPLLSQLGQPSIFDTQKGQGPGGDGFYLPTAGAP

SEQ ID NO: 25930 - protein, 74 aa, Artificial Sequence
  Synthetic polypeptide
ALSSGPSVIYSALYPWLLPPAQWAVPILPPPEPPGAPQQWEPPPQPAGSAQHFRYPERSGARRRRFLPAHRGGS

SEQ ID NO: 25931 - protein, 97 aa, Artificial Sequence
  Synthetic polypeptide
STQHCIPGFSHLPSGLYPSYLHLNHLEPPSSGSPLLSQLGQPSIFDTQKGQGPGGGKTGVRGWGWHRGLLRGFWGLWQHPGSPQLCPGCWLFFFFFF

SEQ ID NO: 25932 - protein, 64 aa, Artificial Sequence
  Synthetic polypeptide
ALSSGPSVIYSALYPWLLPPAQWAVPILPPPEPPGAPQQWEPPPQPAGSAQHFRYPERSGARRR

SEQ ID NO: 25933 - protein, 91 aa, Artificial Sequence
  Synthetic polypeptide
SKCCGILQSDKSKIYRVSAERDGDRGAECGDVLRLPERLRLGVSGDPMVVPAGAGGPGSRGRGGRRAGGALARQRPGQRRDQDQHSESPRQ

SEQ ID NO: 25934 - protein, 91 aa, Artificial Sequence; identical to SEQ ID NO: 25933
  Synthetic polypeptide

SEQ ID NO: 25935 - protein, 91 aa, Artificial Sequence; identical to SEQ ID NO: 25933
  Synthetic polypeptide

SEQ ID NO: 25936 - protein, 91 aa, Artificial Sequence; identical to SEQ ID NO: 25933
  Synthetic polypeptide

SEQ ID NO: 25937 - protein, 91 aa, Artificial Sequence; identical to SEQ ID NO: 25933
  Synthetic polypeptide

SEQ ID NO: 25938 - protein, 229 aa, Artificial Sequence
  Synthetic polypeptide
VNVVEYCNLTKAKFTEFPRNVTATEGQNVEMSCAFQSGSASVYLEIQWWFLRGPEDLDPGAEGAGAQVELLPDRDPDSDGTKISTVKVQGNDISHKLQISKVRKKDEGLYECRVTDANYGELQEHKAQAYLKVNANSHARRMQAFEASPMWLQDMKPRKNVSAAIPSSIHGSANQRTHSTSSPQVVAKIPKQSPQSGMETHFEPFILPLTNAPQKGQSYRVDRFMNGDF

SEQ ID NO: 25939 - protein, 229 aa, Artificial Sequence; identical to SEQ ID NO: 25938
  Synthetic polypeptide

SEQ ID NO: 25940 - protein, 11 aa, Artificial Sequence
  Synthetic polypeptide
QKQNLPSFRGT

SEQ ID NO: 25941 - protein, 11 aa, Artificial Sequence
  Synthetic polypeptide
QKQNLPSFRGT

SEQ ID NO: 25942 - protein, 11 aa, Artificial Sequence
  Synthetic polypeptide
QKQNLPSFRGT

SEQ ID NO: 25943 - protein, 11 aa, Artificial Sequence
  Synthetic polypeptide
QKQNLPSFRGT

SEQ ID NO: 25944 - protein, 11 aa, Artificial Sequence
  Synthetic polypeptide
QKQNLPSFRGT

SEQ ID NO: 25945 - protein, 221 aa, Artificial Sequence
  Synthetic polypeptide
VNVVEYCNLTKAKFTEFPRNVTATEGQNVEMSCAFQSGSASVYLEIQWWFLRGPEDLDPGAEGAGAQVELLPDRDPDSDGTKISTVKVQGNDISHKLQISKVRKKDEGLYECRVTDANYGELQEHKAQAYLKVNANSHARRMQAFEASPMWLQDMKPRKNVSAAIPSSIHGSANQRTHSTSSPQVVAKIPKQSPQSGARIATSHGLSVLLLVCGFVKGALL

SEQ ID NO: 25946 - protein, 294 aa, Artificial Sequence
  Synthetic polypeptide
VNVVEYCNLTKAKFTEFPRNVTATEGQNVEMSCAFQSGSASVYLEIQWWFLRGPEDLDPGAEGAGAQVELLPDRDPDSDGTKISTVKVQGNDISHKLQISKVRKKDEGLYECRVTDANYGELQEHKAQAYLKVNANSHARRMQAFEASPMWLQDMKPRKNVSAAIPSSIHGSANQRTHSTSSPQVVAKIPKQSPQSVSPILPEVKHLHRPPLLVLPFFSLSSLFSTDPLPTFPTSHRTVKRLPAPLPQPGHGSTPGVQSCVLAPPAKSKSPVKSTERTAKLTLNSKHHPAPTVL

SEQ ID NO: 25947 - protein, 225 aa, Artificial Sequence
  Synthetic polypeptide
VNVVEYCNLTKAKFTEFPRNVTATEGQNVEMSCAFQSGSASVYLEIQWWFLRGPEDLDPGAEGAGAQVELLPDRDPDSDGTKISTVKVQGNDISHKLQISKVRKKDEGLYECRVTDANYGELQEHKAQAYLKVNANSHARRMQAFEASPMWLQDMKPRKNVSAAIPSSIHGSANQRTHSTSSPQVVAKIPKQSPQSAKSKSPVKSTERTAKLTLNSKHHPAPTVL

SEQ ID NO: 25948 - protein, 397 aa, Artificial Sequence
  Synthetic polypeptide
PSVVVDACSATQEAEIIHNFIRRIQTKIKDLLQQMEEGLKTADPHDCSAYTGWTGIALLYLQLYRVTCDQTYLLRSLDYVKRTLRNLNGRRVTFLCGDAGPLAVGAVIYHKLRSDCESQECVTKLLQLQRSVVCQESDLPDELLYGRAGYLYALLYLNTEIGPGTVCESAIKEVVNAIIESGKTLSREERKTERCPLLYQWHRKQYVGAAHGMAGIYYMLMQPAAKVDQETLTEMVKPSIDYVRHKKFRSGNYPSSLSNETDRLVHWCHGAPGVIHMLMQAYKVFKEEKYLKEAMECSDVIWQRGLLRKGYGICHGTAGNGYSFLSLYRLTQDKKYLYRACKFAEWCLDYGAHGCRIPDRPYSLFEGMAGAIHFLSDVLGPETSRFPAFELDSSKRD

SEQ ID NO: 25949 - protein, 58 aa, Artificial Sequence
  Synthetic polypeptide
SQHFGRPKRADCLSPAVRDQPGQHGKTPSLQKKNTKISRAWWWTPVQLLRRPRSFIIS

SEQ ID NO: 25950 - protein, 42 aa, Artificial Sequence
  Synthetic polypeptide
AQQFETSLANMAKHRLYKRKIQKLAERGGGRLFSYSGGRDHS

SEQ ID NO: 25951 - protein, 360 aa, Artificial Sequence
  Synthetic polypeptide
GWVQWFTPVNPSTLGGQGIALLYLQLYRVTCDQTYLLRSLDYVKRTLRNLNGRRVTFLCGDAGPLAVGAVIYHKLRSDCESQECVTKLLQLQRSVVCQESDLPDELLYGRAGYLYALLYLNTEIGPGTVCESAIKEVVNAIIESGKTLSREERKTERCPLLYQWHRKQYVGAAHGMAGIYYMLMQPAAKVDQETLTEMVKPSIDYVRHKKFRSGNYPSSLSNETDRLVHWCHGAPGVIHMLMQAYKVFKEEKYLKEAMECSDVIWQRGLLRKGYGICHGTAGNGYSFLSLYRLTQDKKYLYRACKFAEWCLDYGAHGCRIPDRPYSLFEGMAGAIHFLSDVLGPETSRFPAFELDSSKRD

SEQ ID NO: 25952 - protein, 18 aa, Artificial Sequence
  Synthetic polypeptide
AGCSGSRLLIPALWEAKA

SEQ ID NO: 25953 - protein, 21 aa, Artificial Sequence
  Synthetic polypeptide
SQHFGRPRHSPFVPAVVPGHM

SEQ ID NO: 25954 - protein, 222 aa, Artificial Sequence
  Synthetic polypeptide
QVQVPGQQCHRRPGKQPIMESRLQGKQSHSRFDHVENLIERLFTELLPAAKVDQETLTEMVKPSIDYVRHKKFRSGNYPSSLSNETDRLVHWCHGAPGVIHMLMQAYKVFKEEKYLKEAMECSDVIWQRGLLRKGYGICHGTAGNGYSFLSLYRLTQDKKYLYRACKFAEWCLDYGAHGCRIPDRPYSLFEGMAGAIHFLSDVLGPETSRFPAFELDSSKRD

SEQ ID NO: 25955 - protein, 102 aa, Artificial Sequence
  Synthetic polypeptide
FPCTSSQEATGVWCLPQQGSTLRRRIRSREEGLPYKTGEQNPQEVDRCKSQDSSVTEDLESSQLWRVASRESKVIVDLTMWKILSRDFLQSCCRQQKWTKKP

SEQ ID NO: 25956 - protein, 32 aa, Artificial Sequence
  Synthetic polypeptide
PCGKSYRETFYRAVAGSKSGPRNLDRNGETQY

SEQ ID NO: 25957 - protein, 16 aa, Artificial Sequence
  Synthetic polypeptide
PSSQLKASTNLPALNH

SEQ ID NO: 25958 - protein, 16 aa, Artificial Sequence
  Synthetic polypeptide
PSSQLKASTNLPALNH

SEQ ID NO: 25959 - protein, 265 aa, Artificial Sequence
  Synthetic polypeptide
MAVRLLPHSVGMLTLNPTTLSGGNPDSPWRSPYGEEPRPTALAELPAESQYQFASLESLTFQDVAVDFTREEWDQLYPAQKNLYRDVMLENYRNLVALGYQLCKPEVIAQLELEEEWVIERDSLLDTHPGDQSHVMSVVRSSVHARWIVGKVIGTKMQKTAKVRVTRLVLDPYLLKYFNKRKTYFAHDALQQCTVGDIVLLRALPVPRAKHVKHELAEIVFKVGKVIDPVTGKPCAGTTYLESPLSSETTQLSKNLEELNISSAQ

SEQ ID NO: 25960 - protein, 470 aa, Artificial Sequence
  Synthetic polypeptide
MAVRLLPHSVGMLTLNPTTLSGGNPDSPWRSPYGEEPRPTALAELPAESQYQFASLESLTFQDVAVDFTREEWDQLYPAQKNLYRDVMLENYRNLVALGYQLCKPEVIAQLELEEEWVIERDSLLDTHPDGENRPEIKKSTTSQNISDENQTHEMIMERLAGDSFWYSILGGLWDFDYHPEFNQENHKRYLGQVTLTHKKITQERSLECNKFAENCNLNSNLMQQRIPSIKIPLNSDTQGNSIKHNSDLIYYQGNYVRETPYEYSECGKIFNQHILLTDHIHTAEKPSECGKAFSHTSSLSQPQMLLTGEKPYKCDECGKRFSQRIHLIQHQRIHTGEKPFICNGCGKAFRQHSSFTQHLRIHTGEKPYKCNQCGKAFSRITSLTEHHRLHTGEKPYECGFCGKAFSQRTHLNQHERTHTGEKPYKCNECGKAFSQSAHLNQHRKIHTREKLCEYKCEQTVRHSPSFSST

SEQ ID NO: 25961 - protein, 141 aa, Artificial Sequence
  Synthetic polypeptide
PLLFKGDQSHVMSVVRSSVHARWIVGKVIGTKMQKTAKVRVTRLVLDPYLLKYFNKRKTYFAHDALQQCTVGDIVLLRALPVPRAKHVKHELAEIVFKVGKVIDPVTGKPCAGTTYLESPLSSETTQLSKNLEELNISSAQ

SEQ ID NO: 25962 - protein, 10 aa, Artificial Sequence
  Synthetic polypeptide
HCCLKVTKAT

SEQ ID NO: 25963 - protein, 7 aa, Artificial Sequence
  Synthetic polypeptide
PLLFKVF

SEQ ID NO: 25964 - protein, 7 aa, Artificial Sequence
  Synthetic polypeptide
PLLFKVF

SEQ ID NO: 25965 - protein, 7 aa, Artificial Sequence
  Synthetic polypeptide
PLLFKVF

SEQ ID NO: 25966 - protein, 94 aa, Artificial Sequence
  Synthetic polypeptide
HCCLKYFNKRKTYFAHDALQQCTVGDIVLLRALPVPRAKHVKHELAEIVFKVGKVIDPVTGKPCAGTTYLESPLSSETTQLSKNLEELNISSAQ

SEQ ID NO: 25967 - protein, 94 aa, Artificial Sequence; identical to SEQ ID NO: 25966
  Synthetic polypeptide

SEQ ID NO: 25968 - protein, 93 aa, Artificial Sequence
  Synthetic polypeptide
HCCLKYFNKRKTYFAHDALQQCTVGDIVLLRALPVPRAKHVKHELAEIVFKVGKVIDPVTGKPCAGTTYLESPLSSETTQLSKNLEELNISSA

SEQ ID NO: 25969 - protein, 158 aa, Artificial Sequence
  Synthetic polypeptide
GRARWLTPVILALWEAEAGGSRGDQSHVMSVVRSSVHARWIVGKVIGTKMQKTAKVRVTRLVLDPYLLKYFNKRKTYFAHDALQQCTVGDIVLLRALPVPRAKHVKHELAEIVFKVGKVIDPVTGKPCAGTTYLESPLSSETTQLSKNLEELNISSAQ

SEQ ID NO: 25970 - protein, 16 aa, Artificial Sequence
  Synthetic polypeptide
HSGRPRRADHEVTKAT

SEQ ID NO: 25971 - protein, 22 aa, Artificial Sequence
  Synthetic polypeptide
PGAVAHACNPSTLGGRGGRITR

SEQ ID NO: 25972 - protein, 38 aa, Artificial Sequence
  Synthetic polypeptide
GRARWLTPVILALWEAEAGGSRGQEIKTILANTVTKAT

SEQ ID NO: 25973 - protein, 22 aa, Artificial Sequence
  Synthetic polypeptide
HSGRPRRADHEVRRSRPSWLTR

SEQ ID NO: 25974 - protein, 137 aa, Artificial Sequence
  Synthetic polypeptide
HGDQSHVMSVVRSSVHARWIVGKVIGTKMQKTAKVRVTRLVLDPYLLKYFNKRKTYFAHDALQQCTVGDIVLLRALPVPRAKHVKHELAEIVFKVGKVIDPVTGKPCAGTTYLESPLSSETTQLSKNLEELNISSAQ

SEQ ID NO: 25975 - protein, 32 aa, Artificial Sequence
  Synthetic polypeptide
APVKSGPGSSVHRQWLTGHGHLPATDLEKTAG

SEQ ID NO: 25976 - protein, 32 aa, Artificial Sequence; identical to SEQ ID NO: 25975
  Synthetic polypeptide

SEQ ID NO: 25977 - protein, 32 aa, Artificial Sequence; identical to SEQ ID NO: 25975
  Synthetic polypeptide

SEQ ID NO: 25978 - protein, 24 aa, Artificial Sequence
  Synthetic polypeptide
QDMDIFQQQISRRQLAKILICPES

SEQ ID NO: 25979 - protein, 24 aa, Artificial Sequence
  Synthetic polypeptide
QDMDIFQQQISRRQLAKILICPES

SEQ ID NO: 25980 - protein, 24 aa, Artificial Sequence
  Synthetic polypeptide
QDMDIFQQQISRRQLAKILICPES

SEQ ID NO: 25981 - protein, 314 aa, Artificial Sequence
  Synthetic polypeptide
SRPPGCPYPCHNSYLLPCVIIEELVCLSCDRVCLSALTSKLSSREVRARFICASSVADRTWTSSSNRSREDSWLKSLFVRKVDPRKDAHSNLLAKKETSNLYKLQFHNVKPECLEAYNKICQEVLPKIHEDKHYPCTLVGTWNTWYGEQDQAVHLWRYEGGYPALTEVMNKLRENKEFLEFRKARSDMLLSRKNQLLLEFSFWNEPVPRSGPNIYELRSYQLRPGTMIEWGNYWARAIRFRQDGNEAVGGFFSQIGQLYMVHHLWAYRDLQTREDIRNAAWHKHGWEELVYYTVPLIQEMESRIMIPLKTSPLQ

SEQ ID NO: 25982 - protein, 275 aa, Artificial Sequence
  Synthetic polypeptide
SRPPGCPYPCHNSYLLPCVIIEELVCLSCDRVCLSALTSKLSSREVRARFICASSVADRTWTSSSNRSREDSWLKSLFVRKVDPRKDAHSNLLAKKETSNLYKLQFKRCCQRFTKINTTLVLWWGLGTRGMASRTKLEFLEFRKARSDMLLSRKNQLLLEFSFWNEPVPRSGPNIYELRSYQLRPGTMIEWGNYWARAIRFRQDGNEAVGGFFSQIGQLYMVHHLWAYRDLQTREDIRNAAWHKHGWEELVYYTVPLIQEMESRIMIPLKTSPLQ

SEQ ID NO: 25983 - protein, 173 aa, Artificial Sequence
  Synthetic polypeptide
SRPPGCPYPCHNSYLLPCVIIEELVCLSCDRVCLSALTSKLSSREVRARFICASSVADRTWTSSSNRSREDSWLKSLFVRKVDPRKDAHSNLLAKKETSNLYKLQFHNVKPECLEAYNKICSSLFAEHKDLTPAWFLGVPIMGFCPTHPVLGTSTACLTISIQSRGVAKDSRR

SEQ ID NO: 25984 - protein, 196 aa, Artificial Sequence
  Synthetic polypeptide
SLRLHFLPQLPHPNHGAVGKTCLLISYTTNAFPGEYIPTVFDNYSANVMVDGKPVNLGLWDTAGQEDYDRLRPLSYPQTDVFLICFSLVSPASFENVRAKWYPEVRHHCPNTPIILVGTKLDLRDDKDTIEKLKEKKLTPITYPQGLAMAKEIGAVKYLECSALTQRGLKTVFDEAIRAVLCPPPVKKRKRKCLLL

SEQ ID NO: 25985 - protein, 19 aa, Artificial Sequence
  Synthetic polypeptide
LRALGSTFFLSCHIQTMEL

SEQ ID NO: 25986 - protein, 19 aa, Artificial Sequence
  Synthetic polypeptide
LRALGSTFFLSCHIQTMEL

SEQ ID NO: 25987 - protein, 16 aa, Artificial Sequence
  Synthetic polypeptide
APLSSSAATSKPWSCR

SEQ ID NO: 25988 - protein, 16 aa, Artificial Sequence
  Synthetic polypeptide
APLSSSAATSKPWSCR

SEQ ID NO: 25989 - protein, 215 aa, Artificial Sequence
  Synthetic polypeptide
SLRLHFLPQLPHPNHGAVGKTCLLISYTTNAFPGEYIPTVFDNYSANVMVDGKPVNLGLWDTAGQEDYDRLRPLSYPQTVGETYGKDITSRGKDKPIADVFLICFSLVSPASFENVRAKWYPEVRHHCPNTPIILVGTKLDLRDDKDTIEKLKEKKLTPITYPQGLAMAKEIGAVKYLECSALTQRGLKTVFDEAIRAVLCPPPVKKRKRKCLLL

SEQ ID NO: 25990 - protein, 17 aa, Artificial Sequence
  Synthetic polypeptide
KSREGSHQMCAARKKKA

SEQ ID NO: 25991 - protein, 17 aa, Artificial Sequence
  Synthetic polypeptide
KSREGSHQMCAARKKKA

SEQ ID NO: 25992 - protein, 109 aa, Artificial Sequence
  Synthetic polypeptide
SKHGKANFTFHRWAGCSESPEKVLTKCVQLGRKRHDSKRCGGFDPHDVLHHVGRGVPVPGLHSVLCAEGVLHHLHRHVRAELPSSHYQLQTTSLLERGLEAAAATQAGL

SEQ ID NO: 25993 - protein, 136 aa, Artificial Sequence
  Synthetic polypeptide
NVYQEFLFLSSAACWCSHLSLWIFNQFDLNMEKQILLSTDGQDVVKVQRRFSPNVCSSEEKGMTASAVAALILMTSSIMSVVGSLYLAYILYFVLKEFCIICIVTYVLNFLLLIINYKRLVYLNEAWKRQLQPKQD

SEQ ID NO: 25994 - protein, 136 aa, Artificial Sequence; identical to SEQ ID NO: 25993
  Synthetic polypeptide

SEQ ID NO: 25995 - protein, 146 aa, Artificial Sequence
  Synthetic polypeptide
SKHGKANFTFHRWAGCSESPEKVLTKCVQLGRKRHDSKRCGGFDPHDVLHHVGRGVPVPGLHSVLCAEGVLHHLHRHVRAELPSSHYQLQTTSLLERGLEAAAATQAGLTPDRLHPNSLKPLSIQFILQQVFIIIIIIIIHNRHFP

SEQ ID NO: 25996 - protein, 89 aa, Artificial Sequence
  Synthetic polypeptide
TGVKSIGSDFRLLGRSPGYPTPEWEALGWPVCGCSGPHHGEVQRVHCLRPAPLGGGCSRQQSLQQGPGEGRAPHQGRDGPDTPWPRQGG

SEQ ID NO: 25997 - protein, 89 aa, Artificial Sequence; identical to SEQ ID NO: 25996
  Synthetic polypeptide

SEQ ID NO: 25998 - protein, 89 aa, Artificial Sequence; identical to SEQ ID NO: 25996
  Synthetic polypeptide

SEQ ID NO: 25999 - protein, 89 aa, Artificial Sequence; identical to SEQ ID NO: 25996
  Synthetic polypeptide

SEQ ID NO: 26000 - protein, 476 aa, Artificial Sequence
  Synthetic polypeptide
VLTSDCWAAALAIPPQSGKLWGGRFVGAVDPIMEKFNASIAYDRHLWEVDVQGSKAYSRGLEKAGLLTKAEMDQILHGLDKVAEEWAQGTFKLNSNDEDIHTANERRLKELIGATAGKLHTGRSRNDQVVTDLRLWMRQTCSTLSGLLWELIRTMVDRAEAERDVLFPGYTHLQRAQPIRWSHWILSHAVALTRDSERLLEVRKRINVLPLGSGAIAGNPLGVDRELLRAELNFGAITLNSMDATSERDFVAEFLFWASLCMTHLSRMAEDLILYCTKEFSFVQLSDAYSTGSSLMPQKKNPDSLELIRSKAGRVFGRCAGLLMTLKGLPSTYNKDLQEDKEAVFEVSDTMSAVLQVATGVISTLQIHQENMGQALSPDMLATDLAYYLVRKGMPFRQAHEASGKAVFMAETKGVALNQLSLQELQTISPLFSGDVICVWDYGHSVEQYGALGGTARSSVDWQIRQVRALLQAQQA

SEQ ID NO: 26001 - protein, 476 aa, Artificial Sequence; identical to SEQ ID NO: 26000
  Synthetic polypeptide

SEQ ID NO: 26002 - protein, 76 aa, Artificial Sequence
  Synthetic polypeptide
LQTAGPQPWLSHPRVGSFGVAGLWVQWTPSWRSSTRPLPTTGTFGRWMFKAAKPTAGAWRRQGSSPRPRWTRYSMA

SEQ ID NO: 26003 - protein, 76 aa, Artificial Sequence; identical to SEQ ID NO: 26002
  Synthetic polypeptide

SEQ ID NO: 26004 - protein, 76 aa, Artificial Sequence; identical to SEQ ID NO: 26002
  Synthetic polypeptide

SEQ ID NO: 26005 - protein, 76 aa, Artificial Sequence; identical to SEQ ID NO: 26002
  Synthetic polypeptide

SEQ ID NO: 26006 - protein, 450 aa, Artificial Sequence
  Synthetic polypeptide
VLTSDCWAAALAIPPQSGKLWGGRFVGAVDPIMEKFNASIAYDRHLWEVDVQGSKAYSRGLEKAGLLTKAEMDQILHGLDKVAEEWAQGTFKLNSNDEDIHTANERRLKELIGATAGKLHTGRSRNDQVVTDLRLWMRQTCSTLSGLLWELIRTMVDRAEAERDVLFPGYTHLQRAQPIRWSHWILSGAIAGNPLGVDRELLRAELNFGAITLNSMDATSERDFVAEFLFWASLCMTHLSRMAEDLILYCTKEFSFVQLSDAYSTGSSLMPQKKNPDSLELIRSKAGRVFGRCAGLLMTLKGLPSTYNKDLQEDKEAVFEVSDTMSAVLQVATGVISTLQIHQENMGQALSPDMLATDLAYYLVRKGMPFRQAHEASGKAVFMAETKGVALNQLSLQELQTISPLFSGDVICVWDYGHSVEQYGALGGTARSSVDWQIRQVRALLQAQQA

SEQ ID NO: 26007 - protein, 456 aa, Artificial Sequence
  Synthetic polypeptide
VLTSDCWAAALAIPPQSGKLWGGRFVGAVDPIMEKFNASIAYDRHLWEVDVQGSKAYSRGLEKAGLLTKAEMDQILHGLDKVAEEWAQGTFKLNSNDEDIHTANERRLKELIGATAGKLHTGRSRNDQVVTDLRLWMRQTCSTLSGLLWELIRTMVDRAEAERDVLFPGYTHLQRAQPIRWSHWILSHAVALTRDSERLLEVRKRINVLPLGSGAIAGNPLGVDRELLRAELNFGAITLNSMDATSERDFVAEFLFWASLCMTHLSRMAEDLILYCTKEFSFVQLSDAYSTGSSLMPQKKNPDSLELIRSKAGRVFGREDKEAVFEVSDTMSAVLQVATGVISTLQIHQENMGQALSPDMLATDLAYYLVRKGMPFRQAHEASGKAVFMAETKGVALNQLSLQELQTISPLFSGDVICVWDYGHSVEQYGALGGTARSSVDWQIRQVRALLQAQQA

SEQ ID NO: 26008 - protein, 2 aa, Artificial Sequence
  Synthetic polypeptide
PD

SEQ ID NO: 26009 - protein, 6 aa, Artificial Sequence
  Synthetic polypeptide
QTEQVE

SEQ ID NO: 26010 - protein, 17 aa, Artificial Sequence
  Synthetic polypeptide
PGAVVHACNPSTLGGPD

SEQ ID NO: 26011 - protein, 21 aa, Artificial Sequence
  Synthetic polypeptide
QVRWFTPVIPALWEAQTEQVE

SEQ ID NO: 26012 - protein, 13 aa, Artificial Sequence
  Synthetic polypeptide
SQHFGRPRLSKWS

SEQ ID NO: 26013 - protein, 264 aa, Artificial Sequence
  Synthetic polypeptide
RGGDWNTFLLRFNDLDLCVSENETLKHLTNDTTTPESTMTSGQARASTQSPQALEDSGPVNISVSITLTLDPLKPFGGYSRNVTHLYSTILGHQIGLSGREAHEEINITFTLPTAWSSDDCALHGHCEQVVFTACMTLTASPGVFPVTVQPPHCVPDTYSNATLWYKIFTTARDANTKYAQDYNPFWCYKGAIGKVYHALNPKLTVIVPDDDRSLINLHLMHTSYFLFVMVITMFCYAVIKGRPSKLRQSNPEFCPEKVALAEA

SEQ ID NO: 26014 - protein, 38 aa, Artificial Sequence
  Synthetic polypeptide
GAGIGILFCYGSMIWTCVYQRMKPSSISQTTPQLRKVQ

SEQ ID NO: 26015 - protein, 38 aa, Artificial Sequence; identical to SEQ ID NO: 26014
  Synthetic polypeptide

SEQ ID NO: 26016 - protein, 38 aa, Artificial Sequence; identical to SEQ ID NO: 26014
  Synthetic polypeptide

SEQ ID NO: 26017 - protein, 38 aa, Artificial Sequence; identical to SEQ ID NO: 26014
  Synthetic polypeptide

SEQ ID NO: 26018 - protein, 38 aa, Artificial Sequence; identical to SEQ ID NO: 26014
  Synthetic polypeptide

SEQ ID NO: 26019 - protein, 12 aa, Artificial Sequence
  Synthetic polypeptide
GRGLEYFSATVQ

SEQ ID NO: 26020 - protein, 12 aa, Artificial Sequence
  Synthetic polypeptide
GRGLEYFSATVQ

SEQ ID NO: 26021 - protein, 12 aa, Artificial Sequence
  Synthetic polypeptide
GRGLEYFSATVQ

SEQ ID NO: 26022 - protein, 12 aa, Artificial Sequence
  Synthetic polypeptide
GRGLEYFSATVQ

SEQ ID NO: 26023 - protein, 12 aa, Artificial Sequence
  Synthetic polypeptide
GRGLEYFSATVQ

SEQ ID NO: 26024 - protein, 12 aa, Artificial Sequence
  Synthetic polypeptide
GRGLEYFSATVQ

SEQ ID NO: 26025 - protein, 64 aa, Artificial Sequence
  Synthetic polypeptide
RGGDWNTFLLRFNDLDLCVSENETLKHLTNDTTTPESTMTSGQARASTQSPQALEDSGPVNISV

SEQ ID NO: 26026 - protein, 153 aa, Artificial Sequence
  Synthetic polypeptide
RGGDWNTFLLRFNDLDLCVSENETLKHLTNDTTTPESTMTSGQARASTQSPQALEDSGPVNISVSITLTLDPLKPFGGYSRNVTHLYSTILGHQIGLSGREAHEEINITFTLPTAWSSDDCALHGHCEQVVFTACMTLTASPGVFPVTVMTVH

SEQ ID NO: 26027 - protein, 22 aa, Artificial Sequence
  Synthetic polypeptide
RGGDWNTFLLRFNDLDLCVSEN

SEQ ID NO: 26028 - protein, 21 aa, Artificial Sequence
  Synthetic polypeptide
GAGIGILFCYGSMIWTCVYQR

SEQ ID NO: 26029 - protein, 89 aa, Artificial Sequence
  Synthetic polypeptide
RGGDWNTFLLRFNDLDLCVSENETLKHLTNDTTTPESTMTSGQARASTQSPQALEDSGPVNISVSITLTLDPLKPFGGYSRNVTHLYST

SEQ ID NO: 26030 - protein, 44 aa, Artificial Sequence
  Synthetic polypeptide
RGGDWNTFLLRFNDLDLCVSENETLKHLTNDTTTPESTMTSGQA

SEQ ID NO: 26031 - protein, 117 aa, Artificial Sequence
  Synthetic polypeptide
ARQPPHCVPDTYSNATLWYKIFTTARDANTKYAQDYNPFWCYKGAIGKVYHALNPKLTVIVPDDDRSLINLHLMHTSYFLFVMVITMFCYAVIKGRPSKLRQSNPEFCPEKVALAEA

SEQ ID NO: 26032 - protein, 52 aa, Artificial Sequence
  Synthetic polypeptide
PDSHRTVFLTRTATPRSGTRSSQLPEMPTQNTPKITILSGVIRGPLEKSIML

SEQ ID NO: 26033 - protein, 8 aa, Artificial Sequence
  Synthetic polypeptide
QTATALCS

SEQ ID NO: 26034 - protein, 275 aa, Artificial Sequence
  Synthetic polypeptide
STPFSSAPRTLPSLDDLRALKGKHFLLDPLMPELLVFPAQTDLHEHPLYRAGHLILQDRASCLPAMLLDPPPGSHVIDACAAPGNKTSHLAALLKNQGKIFAFDLDAKRLASMATLLARAGVSCCELAEEDFLAVSPSDPRYHEVHYILLDPSCSGSGMPSRQLEEPGAGTPSPVRLHALAGFQQRALCHALTFPSLQRLVYSTCSLCQEENEDVVRDALQQNPGAFRLAPALPAWPHRGLSTFPGAEHCLRASPETTLSSGFFVAVIERVEVPR

SEQ ID NO: 26035 - protein, 275 aa, Artificial Sequence; identical to SEQ ID NO: 26034
  Synthetic polypeptide

SEQ ID NO: 26036 - protein, 29 aa, Artificial Sequence
  Synthetic polypeptide
PLLSLQPLGHCLASMTYEPSRGSIFSWTP

SEQ ID NO: 26037 - protein, 29 aa, Artificial Sequence
  Synthetic polypeptide
PLLSLQPLGHCLASMTYEPSRGSIFSWTP

SEQ ID NO: 26038 - protein, 29 aa, Artificial Sequence
  Synthetic polypeptide
PLLSLQPLGHCLASMTYEPSRGSIFSWTP

SEQ ID NO: 26039 - protein, 29 aa, Artificial Sequence
  Synthetic polypeptide
PLLSLQPLGHCLASMTYEPSRGSIFSWTP

SEQ ID NO: 26040 - protein, 29 aa, Artificial Sequence
  Synthetic polypeptide
PLLSLQPLGHCLASMTYEPSRGSIFSWTP

SEQ ID NO: 26041 - protein, 312 aa, Artificial Sequence
  Synthetic polypeptide
STPFSSAPRTLPSLDDLRALKGKHFLLDPLMPELLVFPAQTDLHEHPLYRAGHLILQDRASCLPAMLLDPPPGSHVIDACAAPGNKTSHLAALLKNQGKIFAFDLDAKRLASMATLLARAGVSCCELAEEDFLAVSPSDPRYHEVHYILLDPSCSGSGMPSRQLEEPGAGTPSPVRLHALAGFQQRALCHALTFPSLQRLVYSTCSLCQEENEDVVRDALQQNPGAFRLAPALPAWPHRGLSTFPGAEHCLRASPETTLSSGFFVAVIERVEVPSSASQAKASAPERTPSPAPKRKKRQQRAAAGACTPPCT

SEQ ID NO: 26042 - protein, 316 aa, Artificial Sequence
  Synthetic polypeptide
STPFSSAPRTLPSLDDLRALKGKHFLLDPLMPELLVFPAQTDLHEHPLYRAGHLILQDRASCLPAMLLDPPPGSHVIDACAAPGNKTSHLAALLKNQGKIFAFDLDAKRLASMATLLARAGVSCCELAEEDFLAVSPSDPRYHEVHYILLDPSCSGSGMPSRQLEEPGAGTPSPVRLHALAGFQQRALCHALTFPSLQRLVYSTCSLCQEENEDVVRDALQQNPGAFRLAPALPAWPHRGLSTFPGAEHCLRASPETTLSSGFFVAVIERVEVPSLTGQSISTRTHTQPSPKEKEETAKSRSRCLHTALHIAEAPG

SEQ ID NO: 26043 - protein, 30 aa, Artificial Sequence
  Synthetic polypeptide
STPFSSAPRTLPSLDDLRALKGKHFLLDPL

SEQ ID NO: 26044 - protein, 263 aa, Artificial Sequence
  Synthetic polypeptide
TSLGLGTSALSSRMIDIQTRMAGRALELLYLPENKPCYLLDIGCGTGLSGSYLSDEGHYWVGLDISPAMLDEAVDREIEGDLLLGDMGQGIPFKPGTFDGCISISAVQWLCNANKKSENPAKRLYCFFASLFSVLVRGSRAVLQLYPENSEQLELITTQATKAGFSGGMVVDYPNSAKAKKFYLCLFSGPSTFIPEGLSENQDEVEPRESVFTNERFPLRMSRRGMVRKSRAWVLEKKERHRRQGREVRPDTQYTGRKRKPRF

SEQ ID NO: 26045 - protein, 14 aa, Artificial Sequence
  Synthetic polypeptide
LSGPRYLSVELTDD

SEQ ID NO: 26046 - protein, 14 aa, Artificial Sequence
  Synthetic polypeptide
LSGPRYLSVELTDD

SEQ ID NO: 26047 - protein, 14 aa, Artificial Sequence
  Synthetic polypeptide
LSGPRYLSVELTDD

SEQ ID NO: 26048 - protein, 14 aa, Artificial Sequence
  Synthetic polypeptide
LSGPRYLSVELTDD

SEQ ID NO: 26049 - protein, 14 aa, Artificial Sequence
  Synthetic polypeptide
LSGPRYLSVELTDD

SEQ ID NO: 26050 - protein, 14 aa, Artificial Sequence
  Synthetic polypeptide
LSGPRYLSVELTDD

SEQ ID NO: 26051 - protein, 122 aa, Artificial Sequence
  Synthetic polypeptide
TSLGLGTSALSSRMIDIQTRMAGRALELLYLPENKPCYLLDIGCGTGLSGSYLSDEGHYWVGLDISPAMLAFLLCSGSVMLTRSLKTLPSACTAFLLLFFLFSSGDPELSCSCTLRTQSSWS

SEQ ID NO: 26052 - protein, 82 aa, Artificial Sequence
  Synthetic polypeptide
TSLGLGTSALSSRMIDIQTRMAGRALELLYLPENKPCYLLDIGCGTGLSGSYLSDEGHYWVGLDISPAMLGPGIPSCPAAVP

SEQ ID NO: 26053 - protein, 82 aa, Artificial Sequence; identical to SEQ ID NO: 26052
  Synthetic polypeptide

SEQ ID NO: 26054 - protein, 122 aa, Artificial Sequence
  Synthetic polypeptide
TSLGLGTSALSSRMIDIQTRMAGRALELLYLPENKPCYLLDIGCGTGLSGSYLSDEGHYWVGLDISPAMLDEAVDREIEGDLLLGDMGQGIPFKPGTFDGCIRSGDPELSCSCTLRTQSSWS

SEQ ID NO: 26055 - protein, 280 aa, Artificial Sequence
  Synthetic polypeptide
TSLGLGTSALSSRMIDIQTRMAGRALELLYLPENKPCYLLDIGCGTGLSGSYLSDEGHYWVGLDISPAMLDEAVDREIEGDLLLGDMGQGIPFKPGTFDGCISISAVQWLCNANKKSENPAKRLYCFFASLFSVLVRGSRAVLQLYPENSEQLELITTQATKAGFSGGMVVDYPNSAKAKKFYLCLFSGPSTFIPEGLSENQDEVEPRESVFTNEREGGAFERRGIRGHQTRRFPLRMSRRGMVRKSRAWVLEKKERHRRQGREVRPDTQYTGRKRKPRF

SEQ ID NO: 26056 - protein, 9 aa, Artificial Sequence
  Synthetic polypeptide
RAPVSATHG

SEQ ID NO: 26057 - protein, 9 aa, Artificial Sequence
  Synthetic polypeptide
RAPVSATHG

SEQ ID NO: 26058 - protein, 9 aa, Artificial Sequence
  Synthetic polypeptide
RAPVSATHG

SEQ ID NO: 26059 - protein, 9 aa, Artificial Sequence
  Synthetic polypeptide
RAPVSATHG

SEQ ID NO: 26060 - protein, 9 aa, Artificial Sequence
  Synthetic polypeptide
RAPVSATHG

SEQ ID NO: 26061 - protein, 9 aa, Artificial Sequence
  Synthetic polypeptide
RAPVSATHG

SEQ ID NO: 26062 - protein, 38 aa, Artificial Sequence
  Synthetic polypeptide
SQQSQHFGRLRREDRLSSGVRDQPGQRSEPPSPQLTDD

SEQ ID NO: 26063 - protein, 38 aa, Artificial Sequence; identical to SEQ ID NO: 26062
  Synthetic polypeptide

SEQ ID NO: 26064 - protein, 38 aa, Artificial Sequence; identical to SEQ ID NO: 26062
  Synthetic polypeptide

SEQ ID NO: 26065 - protein, 38 aa, Artificial Sequence; identical to SEQ ID NO: 26062
  Synthetic polypeptide

SEQ ID NO: 26066 - protein, 38 aa, Artificial Sequence; identical to SEQ ID NO: 26062
  Synthetic polypeptide

SEQ ID NO: 26067 - protein, 38 aa, Artificial Sequence; identical to SEQ ID NO: 26062
  Synthetic polypeptide

SEQ ID NO: 26068 - protein, 270 aa, Artificial Sequence
  Synthetic polypeptide
AQGFETSLGNVASPRLRNSRMIDIQTRMAGRALELLYLPENKPCYLLDIGCGTGLSGSYLSDEGHYWVGLDISPAMLDEAVDREIEGDLLLGDMGQGIPFKPGTFDGCISISAVQWLCNANKKSENPAKRLYCFFASLFSVLVRGSRAVLQLYPENSEQLELITTQATKAGFSGGMVVDYPNSAKAKKFYLCLFSGPSTFIPEGLSENQDEVEPRESVFTNERFPLRMSRRGMVRKSRAWVLEKKERHRRQGREVRPDTQYTGRKRKPRF

SEQ ID NO: 26069 - protein, 129 aa, Artificial Sequence
  Synthetic polypeptide
AQGFETSLGNVASPRLRNSRMIDIQTRMAGRALELLYLPENKPCYLLDIGCGTGLSGSYLSDEGHYWVGLDISPAMLAFLLCSGSVMLTRSLKTLPSACTAFLLLFFLFSSGDPELSCSCTLRTQSSWS

SEQ ID NO: 26070 - protein, 89 aa, Artificial Sequence
  Synthetic polypeptide
AQGFETSLGNVASPRLRNSRMIDIQTRMAGRALELLYLPENKPCYLLDIGCGTGLSGSYLSDEGHYWVGLDISPAMLGPGIPSCPAAVP

SEQ ID NO: 26071 - protein, 89 aa, Artificial Sequence; identical to SEQ ID NO: 26070
  Synthetic polypeptide

SEQ ID NO: 26072 - protein, 129 aa, Artificial Sequence
  Synthetic polypeptide
AQGFETSLGNVASPRLRNSRMIDIQTRMAGRALELLYLPENKPCYLLDIGCGTGLSGSYLSDEGHYWVGLDISPAMLDEAVDREIEGDLLLGDMGQGIPFKPGTFDGCIRSGDPELSCSCTLRTQSSWS

SEQ ID NO: 26073 - protein, 287 aa, Artificial Sequence
  Synthetic polypeptide
AQGFETSLGNVASPRLRNSRMIDIQTRMAGRALELLYLPENKPCYLLDIGCGTGLSGSYLSDEGHYWVGLDISPAMLDEAVDREIEGDLLLGDMGQGIPFKPGTFDGCISISAVQWLCNANKKSENPAKRLYCFFASLFSVLVRGSRAVLQLYPENSEQLELITTQATKAGFSGGMVVDYPNSAKAKKFYLCLFSGPSTFIPEGLSENQDEVEPRESVFTNEREGGAFERRGIRGHQTRRFPLRMSRRGMVRKSRAWVLEKKERHRRQGREVRPDTQYTGRKRKPRF

SEQ ID NO: 26074 - protein, 13 aa, Artificial Sequence
  Synthetic polypeptide
SCHCTPAWELLQA

SEQ ID NO: 26075 - protein, 13 aa, Artificial Sequence
  Synthetic polypeptide
SCHCTPAWELLQA

SEQ ID NO: 26076 - protein, 13 aa, Artificial Sequence
  Synthetic polypeptide
SCHCTPAWELLQA

SEQ ID NO: 26077 - protein, 13 aa, Artificial Sequence
  Synthetic polypeptide
SCHCTPAWELLQA

SEQ ID NO: 26078 - protein, 13 aa, Artificial Sequence
  Synthetic polypeptide
SCHCTPAWELLQA

SEQ ID NO: 26079 - protein, 13 aa, Artificial Sequence
  Synthetic polypeptide
SCHCTPAWELLQA

SEQ ID NO: 26080 - protein, 13 aa, Artificial Sequence
  Synthetic polypeptide
SCHCTPAWELLQA

SEQ ID NO: 26081 - protein, 13 aa, Artificial Sequence
  Synthetic polypeptide
SCHCTPAWELLQA

SEQ ID NO: 26082 - protein, 13 aa, Artificial Sequence
  Synthetic polypeptide
SCHCTPAWELLQA

SEQ ID NO: 26083 - protein, 13 aa, Artificial Sequence
  Synthetic polypeptide
SCHCTPAWELLQA

SEQ ID NO: 26084 - protein, 13 aa, Artificial Sequence
  Synthetic polypeptide
SCHCTPAWELLQA

SEQ ID NO: 26085 - protein, 13 aa, Artificial Sequence
  Synthetic polypeptide
SCHCTPAWELLQA

SEQ ID NO: 26086 - protein, 13 aa, Artificial Sequence
  Synthetic polypeptide
SCHCTPAWELLQA

SEQ ID NO: 26087 - protein, 13 aa, Artificial Sequence
  Synthetic polypeptide
SCHCTPAWELLQA

SEQ ID NO: 26088 - protein, 73 aa, Artificial Sequence
  Synthetic polypeptide
FKAAVSYDHATALQPGSCCRLSAWWARLWPGSSWCPRSWRSRCWCPRSWDSSCPRCWDPRCCGSRGCVTRSSC

SEQ ID NO: 26089 - protein, 73 aa, Artificial Sequence; identical to SEQ ID NO: 26088
  Synthetic polypeptide

SEQ ID NO: 26090 - protein, 73 aa, Artificial Sequence; identical to SEQ ID NO: 26088
  Synthetic polypeptide

SEQ ID NO: 26091 - protein, 73 aa, Artificial Sequence; identical to SEQ ID NO: 26088
  Synthetic polypeptide

SEQ ID NO: 26092 - protein, 73 aa, Artificial Sequence; identical to SEQ ID NO: 26088
  Synthetic polypeptide

SEQ ID NO: 26093 - protein, 73 aa, Artificial Sequence; identical to SEQ ID NO: 26088
  Synthetic polypeptide

SEQ ID NO: 26094 - protein, 73 aa, Artificial Sequence; identical to SEQ ID NO: 26088
  Synthetic polypeptide

SEQ ID NO: 26095 - protein, 73 aa, Artificial Sequence; identical to SEQ ID NO: 26088
  Synthetic polypeptide

SEQ ID NO: 26096 - protein, 73 aa, Artificial Sequence; identical to SEQ ID NO: 26088
  Synthetic polypeptide

SEQ ID NO: 26097 - protein, 73 aa, Artificial Sequence; identical to SEQ ID NO: 26088
  Synthetic polypeptide

SEQ ID NO: 26098 - protein, 73 aa, Artificial Sequence; identical to SEQ ID NO: 26088
  Synthetic polypeptide

SEQ ID NO: 26099 - protein, 73 aa, Artificial Sequence; identical to SEQ ID NO: 26088
  Synthetic polypeptide

SEQ ID NO: 26100 - protein, 73 aa, Artificial Sequence; identical to SEQ ID NO: 26088
  Synthetic polypeptide

SEQ ID NO: 26101 - protein, 73 aa, Artificial Sequence; identical to SEQ ID NO: 26088
  Synthetic polypeptide

SEQ ID NO: 26102 - protein, 400 aa, Artificial Sequence
  Synthetic polypeptide
AMIMPLHSSLGAAAGLVPGGPGFGPGVVGVPGAGVPGVGVPGAGIPVVPGAGIPGAAVPGVVSPEAAAKAAAKAAKYGARPGVGVGGIPTYGVGAGGFPGFGVGVGGIPGVAGVPGVGGVPGVGGVPGVGISPEAQAAAAAKAAKYGVGTPAAAAAKAAAKAAQFGLVPGVGVAPGVGVAPGVGVAPGVGLAPGVGVAPGVGVAPGVGVAPGIGPGGVAAAAKSAAKVAAKAQLRAAAGLGAGIPGLGVGVGVPGLGVGAGVPGLGVGAGVPGFGAVPGALAAAKAAKYGAAVPGVLGGLGALGGVGIPGGVVGAGPAAAAAAAKAAAKAAQFGLVGAAGLGGLGVGGLGVPGVGGLGGIPPAAAAKAAKYGVAARPGFGLSPIFPGGACLGKACGRKRK

SEQ ID NO: 26103 - protein, 400 aa, Artificial Sequence; identical to SEQ ID NO: 26102
  Synthetic polypeptide

SEQ ID NO: 26104 - protein, 418 aa, Artificial Sequence
  Synthetic polypeptide
AMIMPLHSSLGAAAGLVPGGPGFGPGVVGVPGAGVPGVGVPGAGIPVVPGAGIPGAAVPGVVSPEAAAKAAAKAAKYGARPGVGVGGIPTYGVGAGGFPGFGVGVGGIPGVAGVPGVGGVPGVGGVPGVGISPEAQAAAAAKAAKYGVGTPAAAAAKAAAKAAQFGLVPGVGVAPGVGVAPGVGVAPGVGLAPGVGVAPGVGVAPGVGVAPGIGPGGVAAAAKSAAKVAAKAQLRAAAGLGAGIPGLGVGVGVPGLGVGAGVPGLGVGAGVPGFGAVPGALAAAKAAKYGAAVPGVLGGLGALGGVGIPGGVVGAGPAAAAAAAKAAAKAAQFGLVGAAGLGGLGVGGLGVPGVGGLGGIPPAAAAKAAKYGAAGLGGVLGGAGQFPLGGVAARPGFGLSPIFPGGACLGKACGRKRK

SEQ ID NO: 26105 - protein, 418 aa, Artificial Sequence; identical to SEQ ID NO: 26104
  Synthetic polypeptide

SEQ ID NO: 26106 - protein, 486 aa, Artificial Sequence
  Synthetic polypeptide
AMIMPLHSSLGAAAGLVPGGPGFGPGVVGVPGAGVPGVGVPGAGIPVVPGAGIPGAAVPGVVSPEAAAKAAAKAAKYGARPGVGVGGIPTYGVGAGGFPGFGVGVGGIPGVAGVPGVGGVPGVGGVPGVGISPEAQAAAAAKAAKYGAAGAGVLGGLVPGAPGAVPGVPGTGGVPGVGTPAAAAAKAAAKAAQFALLNLAGLVPGVGVAPGVGVAPGVGVAPGVGLAPGVGVAPGVGVAPGVGVAPGIGPGGVAAAAKSAAKVAAKAQLRAAAGLGAGIPGLGVGVGVPGLGVGAGVPGLGVGAGVPGFGAGADEGVRRSLSPELREGDPSSSQHLPSTPSSPRVPGALAAAKAAKYGAAVPGVLGGLGALGGVGIPGGVVGAGPAAAAAAAKAAAKAAQFGLVGAAGLGGLGVGGLGVPGVGGLGGIPPAAAAKAAKYGAAGLGGVLGGAGQFPLGGVAARPGFGLSPIFPGGACLGKACGRKRK

SEQ ID NO: 26107 - protein, 373 aa, Artificial Sequence
  Synthetic polypeptide
AMIMPLHSSLGAAAGLVPGGPGFGPGVVGVPGAGVPGVGVPGAGIPVVPGAGIPGAAVPGVVSPEAAAKAAAKAAKYGARPGVGVGGIPTYGVGAGGFPGFGVGVGAEAQAAAAAKAAKYGLVPGVGVAPGVGVAPGVGVAPGVGLAPGVGVAPGVGVAPGVGVAPGIGPGGVAAAAKSAAKVAAKAQLRAAAGLGAGIPGLGVGVGVPGLGVGAGVPGLGVGAGVPGFGAVPGALAAAKAAKYGAAVPGVLGGLGALGGVGIPGGVVGAGPAAAAAAAKAAAKAAQFGLVGAAGLGGLGVGGLGVPGVGGLGGIPPAAAAKAAKYGAAGLGGVLGGAGQFPLGGVAARPGFGLSPIFPGGACLGKACGRKRK

SEQ ID NO: 26108 - protein, 399 aa, Artificial Sequence
  Synthetic polypeptide
AMIMPLHSSLGAAAGLVPGGPGFGPGVVGVPGAGVPGVGVPGAGIPVVPGAGIPGAAVPGVVSPEAAAKAAAKAAKYGARPGVGVGGIPTYGVGAGGFPGFGVGVGGIPGVAGVPGVGGVPGVGGVPGVGISPEAQAAAAAKAAKYGLVPGVGVAPGVGVAPGVGVAPGVGLAPGVGVAPGVGVAPGVGVAPGIGPGGVAAAAKSAAKVAAKAQLRAAAGLGAGIPGLGVGVGVPGLGVGAGVPGLGVGAGVPGFGAVPGALAAAKAAKYGAAVPGVLGGLGALGGVGIPGGVVGAGPAAAAAAAKAAAKAAQFGLVGAAGLGGLGVGGLGVPGVGGLGGIPPAAAAKAAKYGAAGLGGVLGGAGQFPLGGVAARPGFGLSPIFPGGACLGKACGRKRK

SEQ ID NO: 26109 - protein, 399 aa, Artificial Sequence; identical to SEQ ID NO: 26108
  Synthetic polypeptide

SEQ ID NO: 26110 - protein, 424 aa, Artificial Sequence
  Synthetic polypeptide
AMIMPLHSSLGAAAGLVPGGPGFGPGVVGVPGAGVPGVGVPGAGIPVVPGAGIPGAAVPGVVSPEAAAKAAAKAAKYGARPGVGVGGIPTYGVGAGGFPGFGVGVGGIPGVAGVPGVGGVPGVGGVPGVGISPEAQAAAAAKAAKYGVGTPAAAAAKAAAKAAQFALLNLAGLVPGVGVAPGVGVAPGVGVAPGVGLAPGVGVAPGVGVAPGVGVAPGIGPGGVAAAAKSAAKVAAKAQLRAAAGLGAGIPGLGVGVGVPGLGVGAGVPGLGVGAGVPGFGAVPGALAAAKAAKYGAAVPGVLGGLGALGGVGIPGGVVGAGPAAAAAAAKAAAKAAQFGLVGAAGLGGLGVGGLGVPGVGGLGGIPPAAAAKAAKYGAAGLGGVLGGAGQFPLGGVAARPGFGLSPIFPGGACLGKACGRKRK

SEQ ID NO: 26111 - protein, 381 aa, Artificial Sequence
  Synthetic polypeptide
AMIMPLHSSLGAAAGLVPGGPGFGPGVVGVPGAGVPGVGVPGAGIPVVPGAGIPGAAVPGVVSPEAAAKAAAKAAKYGARPGVGVGGIPTYGVGAGGFPGFGVGVGGIPGVAGVPGVGGVPGVGGVPGVGISPEAQAAAAAKAAKYGLVPGVGVAPGVGVAPGVGVAPGVGLAPGVGVAPGVGVAPGVGVAPGIGPGGVAAAAKSAAKVAAKAQLRAAAGLGAGIPGLGVGVGVPGLGVGAGVPGLGVGAGVPGFGAVPGALAAAKAAKYGAAVPGVLGGLGALGGVGIPGGVVGAGPAAAAAAAKAAAKAAQFGLVGAAGLGGLGVGGLGVPGVGGLGGIPPAAAAKAAKYGVAARPGFGLSPIFPGGACLGKACGRKRK

SEQ ID NO: 26112 - protein, 381 aa, Artificial Sequence; identical to SEQ ID NO: 26111
  Synthetic polypeptide

SEQ ID NO: 26113 - protein, 381 aa, Artificial Sequence; identical to SEQ ID NO: 26111
  Synthetic polypeptide

SEQ ID NO: 26114 - protein, 366 aa, Artificial Sequence
  Synthetic polypeptide
AMIMPLHSSLGAAAGLVPGGPGFGPGVVGVPGAGVPGVGVPGAGIPVVPGAGIPGAAVPGVVSPEAAAKAAAKAAKYGARPGVGVGGIPTYGVGAGGFPGFGVGVGGIPGVAGVPGVGGVPGVGGVPGVGISPEAQAAAAAKAAKYGLVPGVGVAPGVGVAPGVGVAPGVGLAPGVGVAPGVGVAPGVGVAPGIGPGGVAGAAAGLGAGIPGLGVGVGVPGLGVGAGVPGLGVGAGVPGFGAVPGALAAAKAAKYGAAVPGVLGGLGALGGVGIPGGVVGAGPAAAAAAAKAAAKAAQFGLVGAAGLGGLGVGGLGVPGVGGLGGIPPAAAAKAAKYGVAARPGFGLSPIFPGGACLGKACGRKRK

SEQ ID NO: 26115 - protein, 451 aa, Artificial Sequence
  Synthetic polypeptide
AMIMPLHSSLGAAAGLVPGGPGFGPGVVGVPGAGVPGVGVPGAGIPVVPGAGIPGAAVPGVVSPEAAAKAAAKAAKYGARPGVGVGGIPTYGVGAGGFPGFGVGVGGIPGVAGVPGVGGVPGVGGVPGVGISPEAQAAAAAKAAKYGVGTPAAAAAKAAAKAAQFGLVPGVGVAPGVGVAPGVGVAPGVGLAPGVGVAPGVGVAPGVGVAPGIGPGGVAAAAKSAAKVAAKAQLRAAAGLGAGIPGLGVGVGVPGLGVGAGVPGLGVGAGVPGFGAGADEGVRRSLSPELREGDPSSSQHLPSTPSSPRVPGALAAAKAAKYGAAVPGVLGGLGALGGVGIPGGVVGAGPAAAAAAAKAAAKAAQFGLVGAAGLGGLGVGGLGVPGVGGLGGIPPAAAAKAAKYGAAGLGGVLGGAGQFPLGGVAARPGFGLSPIFPGGACLGKACGRKRK

SEQ ID NO: 26116 - protein, 52 aa, Artificial Sequence
  Synthetic polypeptide
TEITPLQYSWEGGGSAVPRGGGVHHQGRPGADHSGREVARAAAGGGAHPAPR

SEQ ID NO: 26117 - protein, 603 aa, Artificial Sequence
  Synthetic polypeptide
SQLLGRLRQENRLNPGGGGCSEPRSHHYSTAGKVEDLQFRVEEESITKGDLELTTVAEKSRVLQLEEELTLRRGEIEELQQCLLHSGPPPPDHPDAAEILRLRERLLSASKEHQRESGVLRDKYEKALKAYQAEVDKLRAANEKYAQEVAGLKDKVQQATSENMGLMDNWKSKLDSLASDHQKSLEDLKATLNSGPGAQQKEIGELKAVMEGIKMEHQLELGNLQAKHDLETAMHVKEKEALREKLQEAQEELAGLQRHWRAQLEVQASQHRLELQEAQDQRRDAELRVHELEKLDVEYRGQAQAIEFLKEQISLAEKKMLDYERLQRAEAQGKQEVESLREKLLVAENRLQAVEALCSSQHTHMIESNDISEETIRTKETVEGLQDKLNKRDKEVTALTSQTEMLRAQVSALESKCKSGEKKVDALLKEKRRLEAELETVSRKTHDASGQLVLISQELLRKERSLNELRVLLLEANRHSPGPERDLSREVHKAEWRIKEQKLKDDIRGLREKLTGLDKEKSLSDQRRYSLIDRSSAPELLRLQHQLMSTEDALRDALDQAQQVEKLMEAMRSCPDKAQTIGNSGSANGIHQQDKAQKQEDKH

SEQ ID NO: 26118 - protein, 39 aa, Artificial Sequence
  Synthetic polypeptide
TQEVEVAVNRDHTTTVQLGRWRICSSAWRRSPSPRETWS

SEQ ID NO: 26119 - protein, 87 aa, Artificial Sequence
  Synthetic polypeptide
TEITPLQYSWEGGGSAVPRGGGVHHQGRPGDPDAAGARAHWGAGTEPATGEGAGRAAAPRISGQQADHSGREVARAAAGGGAHPAPR

SEQ ID NO: 26120 - protein, 87 aa, Artificial Sequence; identical to SEQ ID NO: 26119
  Synthetic polypeptide

SEQ ID NO: 26121 - protein, 638 aa, Artificial Sequence
  Synthetic polypeptide
SQLLGRLRQENRLNPGGGGCSEPRSHHYSTAGKVEDLQFRVEEESITKGDLETQTQLEHARIGELEQSLLLEKAQAERLLRELADNRLTTVAEKSRVLQLEEELTLRRGEIEELQQCLLHSGPPPPDHPDAAEILRLRERLLSASKEHQRESGVLRDKYEKALKAYQAEVDKLRAANEKYAQEVAGLKDKVQQATSENMGLMDNWKSKLDSLASDHQKSLEDLKATLNSGPGAQQKEIGELKAVMEGIKMEHQLELGNLQAKHDLETAMHVKEKEALREKLQEAQEELAGLQRHWRAQLEVQASQHRLELQEAQDQRRDAELRVHELEKLDVEYRGQAQAIEFLKEQISLAEKKMLDYERLQRAEAQGKQEVESLREKLLVAENRLQAVEALCSSQHTHMIESNDISEETIRTKETVEGLQDKLNKRDKEVTALTSQTEMLRAQVSALESKCKSGEKKVDALLKEKRRLEAELETVSRKTHDASGQLVLISQELLRKERSLNELRVLLLEANRHSPGPERDLSREVHKAEWRIKEQKLKDDIRGLREKLTGLDKEKSLSDQRRYSLIDRSSAPELLRLQHQLMSTEDALRDALDQAQQVEKLMEAMRSCPDKAQTIGNSGSANGIHQQDKAQKQEDKH

SEQ ID NO: 26122 - protein, 638 aa, Artificial Sequence; identical to SEQ ID NO: 26121
  Synthetic polypeptide

SEQ ID NO: 26123 - protein, 69 aa, Artificial Sequence
  Synthetic polypeptide
TQEVEVAVNRDHTTTVQLGRWRICSSAWRRSPSPRETWRPRRSWSTRALGSWNRACYWRRRRPSGCSEN

SEQ ID NO: 26124 - protein, 69 aa, Artificial Sequence; identical to SEQ ID NO: 26123
  Synthetic polypeptide

SEQ ID NO: 26125 - protein, 37 aa, Artificial Sequence
  Synthetic polypeptide
GWAQWPTPVTPALWEAKAGGSFEPRSLRPAWPIWTST

SEQ ID NO: 26126 - protein, 37 aa, Artificial Sequence; identical to SEQ ID NO: 26125
  Synthetic polypeptide

SEQ ID NO: 26127 - protein, 37 aa, Artificial Sequence; identical to SEQ ID NO: 26125
  Synthetic polypeptide

SEQ ID NO: 26128 - protein, 37 aa, Artificial Sequence; identical to SEQ ID NO: 26125
  Synthetic polypeptide

SEQ ID NO: 26129 - protein, 10 aa, Artificial Sequence
  Synthetic polypeptide
DQPGQYGQAL

SEQ ID NO: 26130 - protein, 10 aa, Artificial Sequence
  Synthetic polypeptide
DQPGQYGQAL

SEQ ID NO: 26131 - protein, 10 aa, Artificial Sequence
  Synthetic polypeptide
DQPGQYGQAL

SEQ ID NO: 26132 - protein, 10 aa, Artificial Sequence
  Synthetic polypeptide
DQPGQYGQAL

SEQ ID NO: 26133 - protein, 14 aa, Artificial Sequence
  Synthetic polypeptide
AQEFETSLANMDKH

SEQ ID NO: 26134 - protein, 14 aa, Artificial Sequence
  Synthetic polypeptide
AQEFETSLANMDKH

SEQ ID NO: 26135 - protein, 14 aa, Artificial Sequence
  Synthetic polypeptide
AQEFETSLANMDKH

SEQ ID NO: 26136 - protein, 14 aa, Artificial Sequence
  Synthetic polypeptide
AQEFETSLANMDKH

SEQ ID NO: 26137 - protein, 10 aa, Artificial Sequence
  Synthetic polypeptide
DQPGQYGQAL

SEQ ID NO: 26138 - protein, 10 aa, Artificial Sequence
  Synthetic polypeptide
DQPGQYGQAL

SEQ ID NO: 26139 - protein, 10 aa, Artificial Sequence
  Synthetic polypeptide
DQPGQYGQAL

SEQ ID NO: 26140 - protein, 10 aa, Artificial Sequence
  Synthetic polypeptide
DQPGQYGQAL

SEQ ID NO: 26141 - protein, 37 aa, Artificial Sequence
  Synthetic polypeptide
GWAQWLMSVIPTLWEAEAGGSLEVRNLRPAWPIWTST

SEQ ID NO: 26142 - protein, 37 aa, Artificial Sequence; identical to SEQ ID NO: 26141
  Synthetic polypeptide

SEQ ID NO: 26143 - protein, 37 aa, Artificial Sequence; identical to SEQ ID NO: 26141
  Synthetic polypeptide

SEQ ID NO: 26144 - protein, 37 aa, Artificial Sequence; identical to SEQ ID NO: 26141
  Synthetic polypeptide

SEQ ID NO: 26145 - protein, 14 aa, Artificial Sequence
  Synthetic polypeptide
GQEFETSLANMDKH

SEQ ID NO: 26146 - protein, 14 aa, Artificial Sequence
  Synthetic polypeptide
GQEFETSLANMDKH

SEQ ID NO: 26147 - protein, 14 aa, Artificial Sequence
  Synthetic polypeptide
GQEFETSLANMDKH

SEQ ID NO: 26148 - protein, 14 aa, Artificial Sequence
  Synthetic polypeptide
GQEFETSLANMDKH

SEQ ID NO: 26149 - protein, 203 aa, Artificial Sequence
  Synthetic polypeptide
YFKTIIILIIKKPEMFETAIKESTSSKSPPRKINSSPNVNTTASGVEDLNIIQVTIPDDDNERLSKVEKARQLREQVNDLFSRKFGEAIGMGFPVKVPYRKITINPGCVVVDGMPPGVSFKAPSYLEISSMRRILDSAEFIKFTVIRPFPGLVINNQLVDQSESEGPVIQESAEPSQLEVPATEEIKETDGSSQIKQEPDPTW

SEQ ID NO: 26150 - protein, 203 aa, Artificial Sequence; identical to SEQ ID NO: 26149
  Synthetic polypeptide

SEQ ID NO: 26151 - protein, 203 aa, Artificial Sequence; identical to SEQ ID NO: 26149
  Synthetic polypeptide

SEQ ID NO: 26152 - protein, 203 aa, Artificial Sequence; identical to SEQ ID NO: 26149
  Synthetic polypeptide

SEQ ID NO: 26153 - protein, 24 aa, Artificial Sequence
  Synthetic polypeptide
SLKSPKCLRRRLRRAPPLRALPEK

SEQ ID NO: 26154 - protein, 24 aa, Artificial Sequence
  Synthetic polypeptide
SLKSPKCLRRRLRRAPPLRALPEK

SEQ ID NO: 26155 - protein, 24 aa, Artificial Sequence
  Synthetic polypeptide
SLKSPKCLRRRLRRAPPLRALPEK

SEQ ID NO: 26156 - protein, 24 aa, Artificial Sequence
  Synthetic polypeptide
SLKSPKCLRRRLRRAPPLRALPEK

SEQ ID NO: 26157 - protein, 5 aa, Artificial Sequence
  Synthetic polypeptide
KARNV

SEQ ID NO: 26158 - protein, 5 aa, Artificial Sequence
  Synthetic polypeptide
KARNV

SEQ ID NO: 26159 - protein, 5 aa, Artificial Sequence
  Synthetic polypeptide
KARNV

SEQ ID NO: 26160 - protein, 5 aa, Artificial Sequence
  Synthetic polypeptide
KARNV

SEQ ID NO: 26161 - protein, 416 aa, Artificial Sequence
  Synthetic polypeptide
LAQALGLTEAVKVPYPVFESNPEFLYVEGLPEGIPFRSPTWFGIPRLERIVRGSNKIKFVVKKPELVISYLPPGMASKINTKALQSPKRPRSPGSNSKVPEIEVTVEGPNNNNPQTSAVRTPTQTNGSNVPFKPRGREFSFEAWNAKITDLKQKVENLFNEKCGEALGLKQAVKVPFALFESFPEDFYVEGLPEGVPFRRPSTFGIPRLEKILRNKAKIKFIIKKPEMFETAIKESTSSKSPPRKINSSPNVNTTASGVEDLNIIQVTIPDDDNERLSKVEKARQLREQVNDLFSRKFGEAIGMGFPVKVPYRKITINPGCVVVDGMPPGVSFKAPSYLEISSMRRILDSAEFIKFTVIRPFPGLVINNQLVDQSESEGPVIQESAEPSQLEVPATEEIKETDGSSQIKQEPDPTW

SEQ ID NO: 26162 - protein, 416 aa, Artificial Sequence; identical to SEQ ID NO: 26161
  Synthetic polypeptide

SEQ ID NO: 26163 - protein, 416 aa, Artificial Sequence; identical to SEQ ID NO: 26161
  Synthetic polypeptide

SEQ ID NO: 26164 - protein, 416 aa, Artificial Sequence; identical to SEQ ID NO: 26161
  Synthetic polypeptide

SEQ ID NO: 26165 - protein, 21 aa, Artificial Sequence
  Synthetic polypeptide
GGSARKSVSVDWLKLLDSPRQ

SEQ ID NO: 26166 - protein, 21 aa, Artificial Sequence
  Synthetic polypeptide
GGSARKSVSVDWLKLLDSPRQ

SEQ ID NO: 26167 - protein, 21 aa, Artificial Sequence
  Synthetic polypeptide
GGSARKSVSVDWLKLLDSPRQ

SEQ ID NO: 26168 - protein, 21 aa, Artificial Sequence
  Synthetic polypeptide
GGSARKSVSVDWLKLLDSPRQ

SEQ ID NO: 26169 - protein, 55 aa, Artificial Sequence
  Synthetic polypeptide
ANRFHHLFQLRFVDSGFLECCLENDSEEAQQERVFQLIGSSSWTHRGSKSTISCV

SEQ ID NO: 26170 - protein, 55 aa, Artificial Sequence; identical to SEQ ID NO: 26169
  Synthetic polypeptide

SEQ ID NO: 26171 - protein, 55 aa, Artificial Sequence; identical to SEQ ID NO: 26169
  Synthetic polypeptide

SEQ ID NO: 26172 - protein, 55 aa, Artificial Sequence; identical to SEQ ID NO: 26169
  Synthetic polypeptide

SEQ ID NO: 26173 - protein, 94 aa, Artificial Sequence
  Synthetic polypeptide
KEPLNAAPLPCLGSEERLCPVVNCLGSGEHFCLATAPSGNVKNWPSPRQKWPASQCTKQTCLSSEPREDALLLMPGRIFRKILQNTALQRDCVR

SEQ ID NO: 26174 - protein, 94 aa, Artificial Sequence; identical to SEQ ID NO: 26173
  Synthetic polypeptide

SEQ ID NO: 26175 - protein, 94 aa, Artificial Sequence; identical to SEQ ID NO: 26173
  Synthetic polypeptide

SEQ ID NO: 26176 - protein, 94 aa, Artificial Sequence; identical to SEQ ID NO: 26173
  Synthetic polypeptide

SEQ ID NO: 26177 - protein, 36 aa, Artificial Sequence
  Synthetic polypeptide
MQRLCPVWEVRSASAQSSTVWEVGSTSAWPLPHLGM

SEQ ID NO: 26178 - protein, 36 aa, Artificial Sequence; identical to SEQ ID NO: 26177
  Synthetic polypeptide

SEQ ID NO: 26179 - protein, 36 aa, Artificial Sequence; identical to SEQ ID NO: 26177
  Synthetic polypeptide

SEQ ID NO: 26180 - protein, 36 aa, Artificial Sequence; identical to SEQ ID NO: 26177
  Synthetic polypeptide

SEQ ID NO: 26181 - protein, 429 aa, Artificial Sequence
  Synthetic polypeptide
GAPLPSRQLSGKWGALLPGHCPIWECKELAKSKAEVACIAVYETDVFVVGTERGCAFVNARTDFQKDFAKYCVAEGLCEVKPPCPVNGMQVHSGETEILRKAVEDYFCFCYGKALGTTVMVPVPYEKMLRDQSAVVVQGLPEGVAFQHPENYDLATLKWILENKAGISFIINRPFLGPESQLGGPGMVTDAERSIVSPSESCGPINVKTEPMEDSGISLKAEAVSVKKESEDPNYYQYNMQGSHPSSTSNEVIEMELPMEDSTPLVPSEEPNEDPEAEVKIEGNTNSSSVTNSAAGVEDLNIVQVTVPDNEKERLSSIEKIKQLREQVNDLFSRKFGEAIGVDFPVKVPYRKITFNPGCVVIDGMPPGVVFKAPGYLEISSMRRILEAAEFIKFTVIRPLPGLELSNGLLEAKARGLLEARSLRPAWAT

SEQ ID NO: 26182 - protein, 218 aa, Artificial Sequence
  Synthetic polypeptide
GAPLPSRQLSGKWGALLPGHCPIWECKELAKSKAEVACIAVYETDVFVVGTERGCAFVNARTDFQKDFAKYCVAEGLCEVKPPCPVNGMQVHSGETEILRKAVEDYFCFCYGKALGTTVMVPVPYEKMLRDQSAVVVQGLPEGVAFQHPENYDLATLKWILENKAGISFIINRPFLGPESQLGGPGMVTDAERSIVSPSERHFTESRSCLSQERIRRS

SEQ ID NO: 26183 - protein, 218 aa, Artificial Sequence; identical to SEQ ID NO: 26182
  Synthetic polypeptide

SEQ ID NO: 26184 - protein, 941 aa, Artificial Sequence
  Synthetic polypeptide
GAPLPSRQLSGKWGALLPGHCPIWECKELAKSKAEVACIAVYETDVFVVGTERGCAFVNARTDFQKDFAKYCVAEGLCEVKPPCPVNGMQVHSGETEILRKAVEDYFCFCYGKALGTTVMVPVPYEKMLRDQSAVVVQGLPEGVAFQHPENYDLATLKWILENKAGISFIINRPFLGPESQLGGPGMVTDAERSIVSPSESCGPINVKTEPMEDSGISLKAEAVSVKKESEDPNYYQYNMQGSHPSSTSNEVIEMELPMEDSTPLVPSEEPNEDPEAEVKIEGNTNSSSVTNSAAGVEDLNIVQVTVPDNEKERLSSIEKIKQLREQVNDLFSRKFGEAIGVDFPVKVPYRKITFNPGCVVIDGMPPGVVFKAPGYLEISSMRRILEAAEFIKFTVIRPLPGLELSNVGKRKIDQEGRVFQEKWERAYFFVEVQNIPTCLICKQSMSVSKEYNLRRHYQTNHSKHYDQYTERMRDEKLHELKKGLRKYLLGSSDTECPEQKQVFANPSPTQKSPVQPVEDLAGNLWEKLREKIRSFVAYSIAIDEITDINNTTQLAIFIRGVDENFDVSEELLDTVPMTGTKSGNEIFLRVEKSLKKFCINWSRLVSVASTGTPAMVDANNGLVTKLKSRVATFCKGAELKSICCIIHPESLCAQKLKMDHVMDVVVKSVNWICSRGLNHSEFTTLLYELDSQYGSLLYYTEIKWLSRGLVLKRFFESLEEIDSFMSSRGKPLPQLSSIDWIRDLAFLVDMTMHLNALNISLQGHSQIVTQMYDLIRAFLAKLCLWETHLTRNNLAHFPTLKLVSRNESDGLNYIPKIAELKTEFQKRLSDFKLYESELTLFSSPFSTKIDSVHEELQMEVIDLQCNTVLKTKYDKVGIPEFYKYLWGSYPKYKHHCAKILSMFGSTYICEQLFSIMKLSKTKYCSQLKDSQWDSVLHIAT

SEQ ID NO: 26185 - protein, 894 aa, Artificial Sequence
  Synthetic polypeptide
WFYKGKFPYISSLACHHVRCGFVPASPSSMIMRSPQHCGTGNAQKGEAGERGPGGIPGYKGDKGERGECGKPGIKGDKGSPGPYGPKGPRGIQGITGPPGDPGPKGFQGNKGEPGPPGPYGSPGAPGIGQQGIKGERGQEGRPGAPGPIGVGEPGQPGPRGPEGVPGERGLPGEGFPGPKGEKGSEGPTGPQGLQGLSIKGEKGDIGPVGPQGPMGIPGIGSQGEQGIQGPIGPPGPQGPAGQGLPGSKGEVGQMGPTGPRGPVGIGVQGPKGEPGSIGLPGQPGVPGEDGAAGKKGEAGLPGARGPEGPPGKGQPGPKGDEGKKGSKGNQGQRGLPGPEGPKGEPGIMGPFGMPGTSIPGPPGPKGDRGGPGIPGFKGEPGLSIRGPKGVQGPRGPVGAPGLKGDGYPGVPGPRGLPGPPGPMGLRGVGDTGAKGEPGVRGPPGPSGPRGVGTQGPKGDTGQKGLPGPPGPPGYGSQGIKGEQGPQGFPGPKGTMGHGLPGQKGEHGERGDVGKKGDKGEIGEPGSPGKQGLQGPKGDLGLTKEEIIKLITEICGCGPKCKETPLELVFVIDSSESVGPENFQIIKNFVKTMADRVALDLATARIGIINYSHKVEKVANLKQFSSKDDFKLAVDNMQYLGEGTYTATALQAANDMFEDARPGVKKVALVITDGQTDSRDKEKLTEVVKNASDTNVEIFVIGVVKKNDPNFEIFHKEMNLIATDPEHVYQFDDFFTLQDTLKQKLFQKICEDFDSYLVQIFGSSSPQPGFGMSGEELSESTPEPQKEISESLSVTRDQDEDDKAPEPTWADDLPATTSSEATTTPRPLLSTPVDGAEDPRCLEALKPGNCGEYVVRWYYDKQVNSCARFWFSGCNGSGNRFNSEKECQETCIQG

SEQ ID NO: 26186 - protein, 41 aa, Artificial Sequence
  Synthetic polypeptide
GLPSTVELATLKKEKLEKEVQGEFLGTRVTRVNVGNVVNQG

SEQ ID NO: 26187 - protein, 57 aa, Artificial Sequence
  Synthetic polypeptide
GEVPLHKLSCLSPCKMWLCSCFTFLHDYEVSPALWNWQRSKRRSWRKRSRGNSWVQG

SEQ ID NO: 26188 - protein, 57 aa, Artificial Sequence; identical to SEQ ID NO: 26187
  Synthetic polypeptide

SEQ ID NO: 26189 - protein, 103 aa, Artificial Sequence
  Synthetic polypeptide
WFYKGKFPYISSLACHHVRCGFVPASPSSMIMRSPQHCGTGNAQKGEAGERGPGGIPGYKGDKQYSREDREVEHNNEKYVACLLPSPALLQQSSLTHHGTCSH

SEQ ID NO: 26190 - protein, 39 aa, Artificial Sequence
  Synthetic polypeptide
GLPSTVELATLKKEKLEKEVQGEFLGTRVTSNILGKTGK

SEQ ID NO: 26191 - protein, 183 aa, Artificial Sequence
  Synthetic polypeptide
GQARWLTPVIPALREAEAGGSRGQEIKTILANTMNGYQRRIKNATEKMMALVAELSMKQALTIELQKEVREKEDFIFTCNSRIEKGLPLNKEIEKEWLKVLRDEEMHALAIAEKSQEFLEADNRQLPNGVYTTAEQRPNAYIPEADATLPLPKPYGALAPFKPSEPGANMRHIRKPVIKPVEI

SEQ ID NO: 26192 - protein, 183 aa, Artificial Sequence; identical to SEQ ID NO: 26191
  Synthetic polypeptide

SEQ ID NO: 26193 - protein, 24 aa, Artificial Sequence
  Synthetic polypeptide
SQHLGRLRQADHEVRRSRPSWLTR

SEQ ID NO: 26194 - protein, 24 aa, Artificial Sequence
  Synthetic polypeptide
SQHLGRLRQADHEVRRSRPSWLTR

SEQ ID NO: 26195 - protein, 13 aa, Artificial Sequence
  Synthetic polypeptide
HDEWLSKKDQKCN

SEQ ID NO: 26196 - protein, 13 aa, Artificial Sequence
  Synthetic polypeptide
HDEWLSKKDQKCN

SEQ ID NO: 26197 - protein, 13 aa, Artificial Sequence
  Synthetic polypeptide
PDEWLSKKDQKCN

SEQ ID NO: 26198 - protein, 13 aa, Artificial Sequence
  Synthetic polypeptide
PDEWLSKKDQKCN

SEQ ID NO: 26199 - protein, 163 aa, Artificial Sequence
  Synthetic polypeptide
NPSANKNTKKISRMNGYQRRIKNATEKMMALVAELSMKQALTIELQKEVREKEDFIFTCNSRIEKGLPLNKEIEKEWLKVLRDEEMHALAIAEKSQEFLEADNRQLPNGVYTTAEQRPNAYIPEADATLPLPKPYGALAPFKPSEPGANMRHIRKPVIKPVEI

SEQ ID NO: 26200 - protein, 163 aa, Artificial Sequence; identical to SEQ ID NO: 26199
  Synthetic polypeptide

SEQ ID NO: 26201 - protein, 16 aa, Artificial Sequence
  Synthetic polypeptide
HGETPALIKIQKKLAG

SEQ ID NO: 26202 - protein, 16 aa, Artificial Sequence
  Synthetic polypeptide
HGETPALIKIQKKLAG

SEQ ID NO: 26203 - protein, 4 aa, Artificial Sequence
  Synthetic polypeptide
QGQD

SEQ ID NO: 26204 - protein, 4 aa, Artificial Sequence
  Synthetic polypeptide
QGQD

SEQ ID NO: 26205 - protein, 51 aa, Artificial Sequence
  Synthetic polypeptide
GRAQWLTPVIPALWEAKECGSPEVRSSRPARPTCYFMYTRSSLIVTTIGNW

SEQ ID NO: 26206 - protein, 51 aa, Artificial Sequence; identical to SEQ ID NO: 26205
  Synthetic polypeptide

SEQ ID NO: 26207 - protein, 51 aa, Artificial Sequence; identical to SEQ ID NO: 26205
  Synthetic polypeptide

SEQ ID NO: 26208 - protein, 51 aa, Artificial Sequence; identical to SEQ ID NO: 26205
  Synthetic polypeptide

SEQ ID NO: 26209 - protein, 33 aa, Artificial Sequence
  Synthetic polypeptide
SQPFGRPRSADHLRSGVRDQPDQHATSCTRDLP

SEQ ID NO: 26210 - protein, 33 aa, Artificial Sequence; identical to SEQ ID NO: 26209
  Synthetic polypeptide

SEQ ID NO: 26211 - protein, 33 aa, Artificial Sequence; identical to SEQ ID NO: 26209
  Synthetic polypeptide

SEQ ID NO: 26212 - protein, 33 aa, Artificial Sequence; identical to SEQ ID NO: 26209
  Synthetic polypeptide

SEQ ID NO: 26213 - protein, 143 aa, Artificial Sequence
  Synthetic polypeptide
GQEFETSPTNMLLHVHEIFLDCHYNWELVIWCISLTLFLLRFVTLGSETSKKYSNTSILLTEQINLYLKMEKKPNKKEELTLVNNVLKLATKLLKELDSPFRLYGLTMNPLLYNITQVVILSAVSGVISDLLGFNLKLWKIKS

SEQ ID NO: 26214 - protein, 143 aa, Artificial Sequence; identical to SEQ ID NO: 26213
  Synthetic polypeptide

SEQ ID NO: 26215 - protein, 143 aa, Artificial Sequence; identical to SEQ ID NO: 26213
  Synthetic polypeptide

SEQ ID NO: 26216 - protein, 143 aa, Artificial Sequence; identical to SEQ ID NO: 26213
  Synthetic polypeptide

SEQ ID NO: 26217 - protein, 21 aa, Artificial Sequence
  Synthetic polypeptide
DVTLPSAMIVRLSQPRGTVMD

SEQ ID NO: 26218 - protein, 21 aa, Artificial Sequence
  Synthetic polypeptide
DVTLPSAMIVRLSQPRGTVMD

SEQ ID NO: 26219 - protein, 21 aa, Artificial Sequence
  Synthetic polypeptide
DVTLPSAMIVRLSQPRGTVMD

SEQ ID NO: 26220 - protein, 21 aa, Artificial Sequence
  Synthetic polypeptide
DVTLPSAMIVRLSQPRGTVMD

SEQ ID NO: 26221 - protein, 8 aa, Artificial Sequence
  Synthetic polypeptide
GFPSHVEL

SEQ ID NO: 26222 - protein, 8 aa, Artificial Sequence
  Synthetic polypeptide
GFPSHVEL

SEQ ID NO: 26223 - protein, 8 aa, Artificial Sequence
  Synthetic polypeptide
GFPSHVEL

SEQ ID NO: 26224 - protein, 8 aa, Artificial Sequence
  Synthetic polypeptide
GFPSHVEL

SEQ ID NO: 26225 - protein, 671 aa, Artificial Sequence
  Synthetic polypeptide
WFYKEEFPCISSLFAFRHPLRCDFAFCHDCEAFPATWNCNGLGIRIVGGKEIPGHSGEIGAYIAKILPGGSAEQTGKLMEGMQVLEWNGIPLTSKTYEEVQSIISQQSGEAEICVRLDLNMLSDSENSQHLELHEPPKAVDKAKSPGVDPKQLAAELQKVSLQQSPLVLSSVVEKGSHVHSGPTSAGSSSVPSPGQPGSPSVSKKKHGSSKPTDGTKVVSHPITGEIQLQINYDLGNLIIHILQARNLVPRDNNGYSDPFVKVYLLPGRGQVMVVQNASAEYKRRTKHVQKSLNPEWNQTVIYKSISMEQLKKKTLEVTVWDYDRFSSNDFLGEVLIDLSSTSHLDNTPRWYPLKEQTESIDHGKSHSSQSSQQSPKPSVIKSRSHGIFPDPSKDMQVPTIEKSHSSPGSSKSSSEGHLRSHGPSRSQSKTSVTQTHLEDAGAAIAAAEAAVQQLRIQPTKPPNHRPAESSVSTGSSGSSFGSGYSVDSEGSSSTAGETNLFPIPRIGKMGQNGQEPVKQPGVGVGLADTEAKTQVMGEIKIALKKEMKTDGEQLIVEILQCRNITYKFKSPDHLPDLYVKIYVMNISTQKKVIKKKTRVCRHDREPSFNETFRFSLSPAGHSLQILLFSNGGKFMKKTLIGEACIWLDKVDLRKRIVNWHKLLVSPTQTH

SEQ ID NO: 26226 - protein, 464 aa, Artificial Sequence
  Synthetic polypeptide
WFYKEEFPCISSLFAFRHPLRCDFAFCHDCEAFPATWNCNGLGIRIVGGKEIPGHSGEIGAYIAKILPGGSAEQTGKLMEGMQVLEWNGIPLTSKTYEEVQSIISQQSGEAEICVRLDLNMLSDSENSQHLELHEPPKAVDKAKSPGVDPKQLAAELQKVSLQQSPLVLSSVVEKGSHVHSGPTSAGSSSVPSPGQPGSPSVSKKKHGSSKPTDGTKVVSHPITGEIQLQINYDLGNLIIHILQARNLVPRDNNGYSDPFVKVYLLPGRGQVMVVQNASAEYKRRTKHVQKSLNPEWNQTVIYKSISMEQLKKKTLEVTVWDYDRFSSNDFLGEVLIDLSSTSHLDNTPRWYPLKEQTESIDHGKSHSSQSSQQSPKPSVIKSRSHGIFPDPSKDMQVPTIEKSHSSPGSSKSSSEGHLRSHGPSRSQSKTSVTQTHLEDAGAAIAAAEAAVQQLRIQPSKRRK

SEQ ID NO: 26227 - protein, 84 aa, Artificial Sequence
  Synthetic polypeptide
WFYKEEFPCISSLFAFRHPLRCDFAFCHDCEAFPATWNCNGLGIRIVGGKEIPGHSGEIGAYIAKILPGGSAEQTGKLMEAWDC

SEQ ID NO: 26228 - protein, 98 aa, Artificial Sequence
  Synthetic polypeptide
WFYKEEFPCISSLFAFRHPLRCDFAFCHDCEAFPATWNCNGLGIRIVGGKEIPGHSGEIGAYIAKILPGGSAEQTGKLMEDGMAVIKVGDQETQHTDE

SEQ ID NO: 26229 - protein, 39 aa, Artificial Sequence
  Synthetic polypeptide
GRRITVTYNEPLCSSLGDRSLVSRRKRTGKISSIPRFPR

SEQ ID NO: 26230 - protein, 39 aa, Artificial Sequence; identical to SEQ ID NO: 26229
  Synthetic polypeptide

SEQ ID NO: 26231 - protein, 39 aa, Artificial Sequence; identical to SEQ ID NO: 26229
  Synthetic polypeptide

SEQ ID NO: 26232 - protein, 39 aa, Artificial Sequence; identical to SEQ ID NO: 26229
  Synthetic polypeptide

SEQ ID NO: 26233 - protein, 39 aa, Artificial Sequence; identical to SEQ ID NO: 26229
  Synthetic polypeptide

SEQ ID NO: 26234 - protein, 39 aa, Artificial Sequence; identical to SEQ ID NO: 26229
  Synthetic polypeptide

SEQ ID NO: 26235 - protein, 39 aa, Artificial Sequence; identical to SEQ ID NO: 26229
  Synthetic polypeptide

SEQ ID NO: 26236 - protein, 39 aa, Artificial Sequence; identical to SEQ ID NO: 26229
  Synthetic polypeptide

SEQ ID NO: 26237 - protein, 39 aa, Artificial Sequence; identical to SEQ ID NO: 26229
  Synthetic polypeptide

SEQ ID NO: 26238 - protein, 39 aa, Artificial Sequence; identical to SEQ ID NO: 26229
  Synthetic polypeptide

SEQ ID NO: 26239 - protein, 39 aa, Artificial Sequence; identical to SEQ ID NO: 26229
  Synthetic polypeptide

SEQ ID NO: 26240 - protein, 411 aa, Artificial Sequence
  Synthetic polypeptide
PIMSRCAPAWATEVLSQEENELGKFLRSQGFQDKTRAGKMMQATGKALCFSSQQRLALRNPLCRFHQEVETFRHRAISDTWLTVNRMEQCRTEYRGALLWMKDVSQELDPDLYKQMEKFRKVQTQVRLAKKNFDKLKMDVCQKVDLLGASRCNLLSHMLATYQTTLLHFWEKTSHTMAAIHESFKGYQPYEFTTLKSLQDPMKKLVEKEEKKKINQQESTDAAVQEPSQLISLEEENQRKESSSFKTEDGKSILSALDKGSTHTACSGPIDELLDMKSEEGACLGPVAGTPEPEGADKDDLLLLSEIFNASSLEEGEFSKEWAAVFGDGQVKEPVPTMALGEPDPKAQTGSGFLPSQLLDQNMKDLQASLQEPAKAASDLTAWFSLFADLDPLSNPDAVGKTDKEHELLNA

SEQ ID NO: 26241 - protein, 411 aa, Artificial Sequence; identical to SEQ ID NO: 26240
  Synthetic polypeptide

SEQ ID NO: 26242 - protein, 411 aa, Artificial Sequence; identical to SEQ ID NO: 26240
  Synthetic polypeptide

SEQ ID NO: 26243 - protein, 411 aa, Artificial Sequence; identical to SEQ ID NO: 26240
  Synthetic polypeptide

SEQ ID NO: 26244 - protein, 411 aa, Artificial Sequence; identical to SEQ ID NO: 26240
  Synthetic polypeptide

SEQ ID NO: 26245 - protein, 36 aa, Artificial Sequence
  Synthetic polypeptide
AVVLQPGRQKSCLKKKTNWENFFDPKVSKIKPEQER

SEQ ID NO: 26246 - protein, 36 aa, Artificial Sequence; identical to SEQ ID NO: 26245
  Synthetic polypeptide

SEQ ID NO: 26247 - protein, 36 aa, Artificial Sequence; identical to SEQ ID NO: 26245
  Synthetic polypeptide

SEQ ID NO: 26248 - protein, 36 aa, Artificial Sequence; identical to SEQ ID NO: 26245
  Synthetic polypeptide

SEQ ID NO: 26249 - protein, 36 aa, Artificial Sequence; identical to SEQ ID NO: 26245
  Synthetic polypeptide

SEQ ID NO: 26250 - protein, 36 aa, Artificial Sequence; identical to SEQ ID NO: 26245
  Synthetic polypeptide

SEQ ID NO: 26251 - protein, 36 aa, Artificial Sequence; identical to SEQ ID NO: 26245
  Synthetic polypeptide

SEQ ID NO: 26252 - protein, 36 aa, Artificial Sequence; identical to SEQ ID NO: 26245
  Synthetic polypeptide

SEQ ID NO: 26253 - protein, 36 aa, Artificial Sequence; identical to SEQ ID NO: 26245
  Synthetic polypeptide

SEQ ID NO: 26254 - protein, 36 aa, Artificial Sequence; identical to SEQ ID NO: 26245
  Synthetic polypeptide

SEQ ID NO: 26255 - protein, 36 aa, Artificial Sequence; identical to SEQ ID NO: 26245
  Synthetic polypeptide

SEQ ID NO: 26256 - protein, 185 aa, Artificial Sequence
  Synthetic polypeptide
PIMSRCAPAWATEVLSQEENELGKFLRSQGFQDKTRAGKMMQATGKALCFSSQQRLALRNPLCRFHQEVETFRHRAISDTWLTVNRMEQCRTEYRGALLWMKDVSQELDPDLYKQMEKFRKVQTQVRLAKKNFDKLKMDVCQKVDLLGASRCNLLSHMLATYQLAWDQWQGPRNLKVLTKMTCCC

SEQ ID NO: 26257 - protein, 440 aa, Artificial Sequence
  Synthetic polypeptide
PIMSRCAPAWATEVLSQEENELGKFLRSQGFQDKTRAGKMMQATGKALCFSSQQRLALRNPLCRFHQEVETFRHRAISDTWLTVNRMEQCRTEYRGALLWMKDVSQELDPDLYKQMEKFRKVQTQVRLAKKNFDKLKMDVCQKVDLLGASRCNLLSHMLATYQTTLLHFWEKTSHTMAAIHESFKGYQPYEFTTLKSLQDPMKKLVEKEEKKKINQQESTDAAVQEPSQYLQNICLEMKANSDIKMLQKGKEGQQIGILISLEEENQRKESSSFKTEDGKSILSALDKGSTHTACSGPIDELLDMKSEEGACLGPVAGTPEPEGADKDDLLLLSEIFNASSLEEGEFSKEWAAVFGDGQVKEPVPTMALGEPDPKAQTGSGFLPSQLLDQNMKDLQASLQEPAKAASDLTAWFSLFADLDPLSNPDAVGKTDKEHELLNA

SEQ ID NO: 26258 - protein, 278 aa, Artificial Sequence
  Synthetic polypeptide
PIMSRCAPAWATEVLSQEENELGKFLRSQGFQDKTRAGKMMQATGKALCFSSQQRLALRNPLCRFHQEVETFRHRAISDTWLTVNRMEQCRTEYRGALLWMKDVSQELDPDLYKQMEKFRKVQTQVRLAKKNFDKLKMDVCQKVDLLGASRCNLLSHMLATYQTTLLHFWEKTSHTMAAIHESFKGYQPYEFTTLKVWKLEGPLENLEKSKVLFISQAKSIAESIIIPGLRMLKRELCPQQSLFLSFFLSFFFFFFFFTASGFNTMRIYCNPKARIEP

SEQ ID NO: 26259 - protein, 196 aa, Artificial Sequence
  Synthetic polypeptide
PIMSRCAPAWATEVLSQEENELGKFLRSQGFQDKTRAGKMMQATGKALCFSSQQRLALRNPLCRFHQEVETFRHRAISDTWLTVNRMEQCRTEYRGALLWMKDVSQELDPDLYKQMEKFRKVQTQVRLAKKNFDKLKMDVCQKVDLLGASRCNLLSHMLATYQTTLLHFWEKTSHTMAAIHESFKGYQPYEFTTLK

SEQ ID NO: 26260 - protein, 90 aa, Artificial Sequence
  Synthetic polypeptide
PIMSRCAPAWATEVLSQEENELGKFLRSQGFQDKTRAGKMMQATGKALCFSSQQRLALRNPLCRFHQEVETFRHRAISDTWLTVNRMEQC

SEQ ID NO: 26261 - protein, 63 aa, Artificial Sequence
  Synthetic polypeptide
PIMSRCAPAWATEVLSQEENELGKFLRSQGFQDKTRAGKMMQATGKALCFSSQQRLALRNPLC

SEQ ID NO: 26262 - protein, 7 aa, Artificial Sequence
  Synthetic polypeptide
LPGVDSC

SEQ ID NO: 26263 - protein, 7 aa, Artificial Sequence
  Synthetic polypeptide
LPGVDSC

SEQ ID NO: 26264 - protein, 7 aa, Artificial Sequence
  Synthetic polypeptide
LPGVDSC

SEQ ID NO: 26265 - protein, 7 aa, Artificial Sequence
  Synthetic polypeptide
LPGVDSC

SEQ ID NO: 26266 - protein, 7 aa, Artificial Sequence
  Synthetic polypeptide
LPGVDSC

SEQ ID NO: 26267 - protein, 7 aa, Artificial Sequence
  Synthetic polypeptide
LPGVDSC

SEQ ID NO: 26268 - protein, 7 aa, Artificial Sequence
  Synthetic polypeptide
LPGVDSC

SEQ ID NO: 26269 - protein, 7 aa, Artificial Sequence
  Synthetic polypeptide
LPGVDSC

SEQ ID NO: 26270 - protein, 791 aa, Artificial Sequence
  Synthetic polypeptide
YQELTHVDQASFQVDAFGTSFILDVVLNHDLLSSEYIERHIEHGGKTVEVKGGEHCYYQGHIRGNPDSFVALSTCHGLHGMFYDGNHTYLIEPEENDTTQEDFHFHSVYKSRLFEFSLDDLPSEFQQVNITPSKFILKPRPKRSKRQLRRYPRNVEEETKYIELMIVNDHLMFKKHRLSVVHTNTYAKSVVNMADLIYKDQLKTRIVLVAMETWATDNKFAISENPLITLREFMKYRRDFIKEKSDAVHLFSGSQFESSRSGAAYIGGICSLLKGGGVNEFGKTDLMAVTLAQSLAHNIGIISDKRKLASGECKCEDTWSGCIMGDTGYYLPKKFTQCNIEEYHDFLNSGGGACLFNKPSKLLDPPECGNGFIETGEECDCGTPAECVLEGAECCKKCTLTQDSQCSDGLCCKKCKFQPMGTVCREAVNDCDIRETCSGNSSQCAPNIHKMDGYSCDGVQGICFGGRCKTRDRQCKYIWGQKVTASDKYCYEKLNIEGTEKGNCGKDKDTWIQCNKRDVLCGYLLCTNIGNIPRLGELDGEITSTLVVQQGRTLNCSGGHVKLEEDVDLGYVEDGTPCGPQMMCLEHRCLPVASFNFSTCLSSKEGTICSGNGVCSNELKCVCNRHWIGSDCNTYFPHNDDAKTGITLSGNGVAGTNIIIGIIAGTILVLALILGITAWGYKNYREQRSNGLSHSWSERIPDTKHISDICENGRPRSNSWQGNLGGNKKKIRGKRFRPRSNSTETLSPAKSPSSSTGSIASSRKYPYPMPPLPDEDKKVNRQSARLWETSI

SEQ ID NO: 26271 - protein, 3 aa, Artificial Sequence
  Synthetic polypeptide
TRS

SEQ ID NO: 26272 - protein, 3 aa, Artificial Sequence
  Synthetic polypeptide
TRS

SEQ ID NO: 26273 - protein, 3 aa, Artificial Sequence
  Synthetic polypeptide
TRS

SEQ ID NO: 26274 - protein, 3 aa, Artificial Sequence
  Synthetic polypeptide
TRS

SEQ ID NO: 26275 - protein, 3 aa, Artificial Sequence
  Synthetic polypeptide
TRS

SEQ ID NO: 26276 - protein, 3 aa, Artificial Sequence
  Synthetic polypeptide
TRS

SEQ ID NO: 26277 - protein, 3 aa, Artificial Sequence
  Synthetic polypeptide
TRS

SEQ ID NO: 26278 - protein, 3 aa, Artificial Sequence
  Synthetic polypeptide
TRS

SEQ ID NO: 26279 - protein, 263 aa, Artificial Sequence
  Synthetic polypeptide
YQELTHVDQASFQVDAFGTSFILDVVLNHDLLSSEYIERHIEHGGKTVEVKGGEHCYYQGHIRGNPDSFVALSTCHGLHGMFYDGNHTYLIEPEENDTTQEDFHFHSVYKSRLFEFSLDDLPSEFQQVNITPSKFILKPRPKRSKRQLRRYPRNVEEETKYIELMIVNDHLMFKKHRLSVVHTNTYAKSVVNMADLIYKDQLKTRIVLVAMETWATDNKFAISENPLITLREFMKYRRDFIKEKSDAVHLFSYVTSVMMYYFF

SEQ ID NO: 26280 - protein, 100 aa, Artificial Sequence
  Synthetic polypeptide
YQELTHVDQASFQVDAFGTSFILDVVLNHDLLSSEYIERHIEHGGKTVEVKGGEHCYYQGHIRGNPDSFVALSTCHGLHGMFYDGNHTYLIEPEENDTTQ

SEQ ID NO: 26281 - protein, 780 aa, Artificial Sequence
  Synthetic polypeptide
YQELTHVDQASFQVDAFGTSFILDVVLNHDLLSSEYIERHIEHGGKTVEVKGGEHCYYQGHIRGNPDSFVALSTCHGLHGMFYDGNHTYLIEPEENDTTQEDFHFHSVYKSRLFEFSLDDLPSEFQQVNITPSKFILKPRPKRSKRQLRRYPRNVEEETKYIELMIVNDHLMFKKHRLSVVHTNTYAKSVVNMADLIYKDQLKTRIVLVAMETWATDNKFAISENPLITLREFMKYRRDFIKEKSDAVHLFSGSQFESSRSGAAYIGGICSLLKGGGVNEFGKTDLMAVTLAQSLAHNIGIISDKRKLASGECKCEDTWSGCIMGDTGYYLPKKFTQCNIEEYHDFLNSGGGACLFNKPSKLLDPPECGNGFIETGEECDCGTPAECVLEGAECCKKCTLTQDSQCSDGLCCKKCKFQPMGTVCREAVNDCDIRETCSGNSSQCAPNIHKMDGYSCDGVQGICFGGRCKTRDRQCKYIWGQKVTASDKYCYEKLNIEGTEKGNCGKDKDTWIQCNKRDVLCGYLLCTNIGNIPRLGELDGEITSTLVVQQGRTLNCSGGHVKLEEDVDLGYVEDGTPCGPQMMCLEHRCLPVASFNFSTCLSSKEGTICSGNGVCSNELKCVCNRHWIGSDCNTYFPHNDDAKTGITLSGNGVAGTNIIIGIIAGTILVLALILGITAWGYKNYREQRQLPQGDYVKKPGDGDSFYSDIPPGVSTNSASSSKKRSNGLSHSWSERIPDTKHISDICENGRPRSNSWQGNLGGNKKKIRGKRFRPRSNSTE

SEQ ID NO: 26282 - protein, 827 aa, Artificial Sequence
  Synthetic polypeptide
YQELTHVDQASFQVDAFGTSFILDVVLNHDLLSSEYIERHIEHGGKTVEVKGGEHCYYQGHIRGNPDSFVALSTCHGLHGMFYDGNHTYLIEPEENDTTQEDFHFHSVYKSRLFEFSLDDLPSEFQQVNITPSKFILKPRPKRSKRQLRRYPRNVEEETKYIELMIVNDHLMFKKHRLSVVHTNTYAKSVVNMADLIYKDQLKTRIVLVAMETWATDNKFAISENPLITLREFMKYRRDFIKEKSDAVHLFSGSQFESSRSGAAYIGGICSLLKGGGVNEFGKTDLMAVTLAQSLAHNIGIISDKRKLASGECKCEDTWSGCIMGDTGYYLPKKFTQCNIEEYHDFLNSGGGACLFNKPSKLLDPPECGNGFIETGEECDCGTPAECVLEGAECCKKCTLTQDSQCSDGLCCKKCKFQPMGTVCREAVNDCDIRETCSGNSSQCAPNIHKMDGYSCDGVQGICFGGRCKTRDRQCKYIWGQKVTASDKYCYEKLNIEGTEKGNCGKDKDTWIQCNKRDVLCGYLLCTNIGNIPRLGELDGEITSTLVVQQGRTLNCSGGHVKLEEDVDLGYVEDGTPCGPQMMCLEHRCLPVASFNFSTCLSSKEGTICSGNGVCSNELKCVCNRHWIGSDCNTYFPHNDDAKTGITLSGNGVAGTNIIIGIIAGTILVLALILGITAWGYKNYREQRQLPQGDYVKKPGDGDSFYSDIPPGVSTNSASSSKKRSNGLSHSWSERIPDTKHISDICENGRPRSNSWQGNLGGNKKKIRGKRFRPRSNSTETLSPAKSPSSSTGSIASSRKYPYPMPPLPDEDKKVNRQSARLWETSI

SEQ ID NO: 26283 - protein, 820 aa, Artificial Sequence
  Synthetic polypeptide
YQELTHVDQASFQVDAFGTSFILDVVLNHDLLSSEYIERHIEHGGKTVEVKGGEHCYYQGHIRGNPDSFVALSTCHGLHGMFYDGNHTYLIEPEENDTTQEDFHFHSVYKSRLFEFSLDDLPSEFQQVNITPSKFILKPRPKRSKRQLRRYPRNVEEETKYIELMIVNDHLMFKKHRLSVVHTNTYAKSVVNMADLIYKDQLKTRIVLVAMETWATDNKFAISENPLITLREFMKYRRDFIKEKSDAVHLFSGSQFESSRSGAAYIGGICSLLKGGGVNEFGKTDLMAVTLAQSLAHNIGIISDKRKLASGECKCEDTWSGCIMGDTGYYLPKKFTQCNIEEYHDFLNSGGGACLFNKPSKLLDPPECGNGFIETGEECDCGTPAECVLEGAECCKKCTLTQDSQCSDGLCCKKCKFQPMGTVCREAVNDCDIRETCSGNSSQCAPNIHKMDGYSCDGVQGICFGGRCKTRDRQCKYIWGQKVTASDKYCYEKLNIEGTEKGNCGKDKDTWIQCNKRDVLCGYLLCTNIGNIPRLGELDGEITSTLVVQQGRTLNCSGGHVKLEEDVDLGYVEDGTPCGPQMMCLEHRCLPVASFNFSTCLSSKEGTICSGNGVCSNELKCVCNRHWIGSDCNTYFPHNDDAKTGITLSGNGVAGTNIIIGIIAGTILVLALILGITAWGYNNIFNFRSNGLSHSWSERIPDTKHISDICENGRPRSNSWQGNLGGNKKKIRGKRFRPRSNSTEYLNPWFKRDYNVAKWVEDVNKNTEGPYFRTLSPAKSPSSSTGSIASSRKYPYPMPPLPDEDKKVNRQSARLWETSI

SEQ ID NO: 26284 - protein, 820 aa, Artificial Sequence
  Synthetic polypeptide
YQELTHVDQASFQVDAFGTSFILDVVLNHDLLSSEYIERHIEHGGKTVEVKGGEHCYYQGHIRGNPDSFVALSTCHGLHGMFYDGNHTYLIEPEENDTTQEDFHFHSVYKSRLFEFSLDDLPSEFQQVNITPSKFILKPRPKRSKRQLRRYPRNVEEETKYIELMIVNDHLMFKKHRLSVVHTNTYAKSVVNMADLIYKDQLKTRIVLVAMETWATDNKFAISENPLITLREFMKYRRDFIKEKSDAVHLFSGSQFESSRSGAAYIGGICSLLKGGGVNEFGKTDLMAVTLAQSLAHNIGIISDKRKLASGECKCEDTWSGCIMGDTGYYLPKKFTQCNIEEYHDFLNSGGGACLFNKPSKLLDPPECGNGFIETGEECDCGTPAECVLEGAECCKKCTLTQDSQCSDGLCCKKCKFQPMGTVCREAVNDCDIRETCSGNSSQCAPNIHKMDGYSCDGVQGICFGGRCKTRDRQCKYIWGQKVTASDKYCYEKLNIEGTEKGNCGKDKDTWIQCNKRDVLCGYLLCTNIGNIPRLGELDGEITSTLVVQQGRTLNCSGGHVKLEEDVDLGYVEDGTPCGPQMMCLEHRCLPVASFNFSTCLSSKEGTICSGNGVCSNELKCVCNRHWIGSDCNTYFPHNDDAKTGITLSGNGVAGTNIIIGIIAGTILVLALILGITAWGYKNYREQRSNGLSHSWSERIPDTKHISDICENGRPRSNSWQGNLGGNKKKIRGKRFRPRSNSTEYLNPWFKRDYNVAKWVEDVNKNTEGPYFRTLSPAKSPSSSTGSIASSRKYPYPMPPLPDEDKKVNRQSARLWETSI

SEQ ID NO: 26285 - protein, 758 aa, Artificial Sequence
  Synthetic polypeptide
YQELTHVDQASFQVDAFGTSFILDVVLNHDLLSSEYIERHIEHGGKTVEVKGGEHCYYQGHIRGNPDSFVALSTCHGLHGMFYDGNHTYLIEPEENDTTQEDFHFHSVYKSRLFEFSLDDLPSEFQQVNITPSKFILKPRPKRSKRQLRRYPRNVEEETKYIELMIVNDHLMFKKHRLSVVHTNTYAKSVVNMADLIYKDQLKTRIVLVAMETWATDNKFAISENPLITLREFMKYRRDFIKEKSDAVHLFSGSQFESSRSGAAYIGGICSLLKGGGVNEFGKTDLMAVTLAQSLAHNIGIISDKRKLASGECKCEDTWSGCIMGDTGYYLPKKFTQCNIEEYHDFLNSGGGACLFNKPSKLLDPPECGNGFIETGEECDCGTPAECVLEGAECCKKCTLTQDSQCSDGLCCKKCKFQPMGTVCREAVNDCDIRETCSGNSSQCAPNIHKMDGYSCDGVQGICFGGRCKTRDRQCKYIWGQKVTASDKYCYEKLNIEGTEKGNCGKDKDTWIQCNKRDVLCGYLLCTNIGNIPRLGELDGEITSTLVVQQGRTLNCSGGHVKLEEDVDLGYVEDGTPCGPQMMCLEHRCLPVASFNFSTCLSSKEGTICSGNGVCSNELKCVCNRHWIGSDCNTYFPHNDDAKTGITLSGNGVAGTNIIIGIIAGTILVLALILGITAWGYKNYREQRQLPQGDYVKKPGDGDSFYSDIPPGVSTNSASSSKKRSNGLSHSWSERIPDTKHISDICENGRPRSNSWQG

SEQ ID NO: 26286 - protein, 464 aa, Artificial Sequence
  Synthetic polypeptide
LTPVIPTLSRQEDHLRPEVQDQPGQHDPFFSHGNSFHGTGGRGNKFAQMRYSLRLLRAVVYLEDETVNKDLCEKGTIQQMIGIFKNIISKPNEKEEAIVLEIQSDILLILSGLCENHIQRKEIFGTEGVDIVLHVMKTDPRKLQSGLGYNVLLFSTLDSIWCCILGCYPSEDYFLEKEGIFLLLDLLALNQKKFCNLILGIMVEFCDNPKTAAHVNAWQGKKDQTAASLLIKLWRKEEKELGVKRDKNGKIIDFENLPGLSAEDFVTLCIIHRYLDFKIGEIWNEIYEEIKLEKLRPVTTDKKALEAITTASENIGKMVASLQSDIIESQACQDMQNEQKVYAKIQATHKQRELANKSWEDFLARTSNAKTLKKAKSLQEKAIEASRYHKRPQNAIFHQTHIKGLNTTVPSGGVVTVESTPARLVGGPLVDTDIALKKLPIRGGALQRVKAVKIVDAPKKSIPT

SEQ ID NO: 26287 - protein, 464 aa, Artificial Sequence; identical to SEQ ID NO: 26286
  Synthetic polypeptide

SEQ ID NO: 26288 - protein, 37 aa, Artificial Sequence
  Synthetic polypeptide
GQKFKTSLGNMIRFSVMVTVFMVQVAEATSLPRCVTV

SEQ ID NO: 26289 - protein, 37 aa, Artificial Sequence; identical to SEQ ID NO: 26288
  Synthetic polypeptide

SEQ ID NO: 26290 - protein, 37 aa, Artificial Sequence; identical to SEQ ID NO: 26288
  Synthetic polypeptide

SEQ ID NO: 26291 - protein, 37 aa, Artificial Sequence; identical to SEQ ID NO: 26288
  Synthetic polypeptide

SEQ ID NO: 26292 - protein, 37 aa, Artificial Sequence; identical to SEQ ID NO: 26288
  Synthetic polypeptide

SEQ ID NO: 26293 - protein, 510 aa, Artificial Sequence
  Synthetic polypeptide
LTPVIPTLSRQEDHLRPEVQDQPGQHDPFFSHGNSFHGTGGRGNKFAQMRYSLRLLRAVVYLEDETVNKDLCEKGTIQQMIGIFKNIISKPNEKEEAIVLEIQSDILLILSGLCENHIQRKEIFGTEGVDIVLHVMKTDPRKLQSGLGYNVLLFSTLDSIWCCILGCYPSEDYFLEKEGIFLLLDLLALNQKKFCNLILGIMVEFCDNPKTAAHVNAWQGKKDQTAASLLIKLWRKEEKELGVKRDKNGKIIDTKKPLFTSFQEEQKIIPLPANCPSIAVMDVSENIRAKIYAILGKLDFENLPGLSAEDFVTLCIIHRYLDFKIGEIWNEIYEEIKLEKLRPVTTDKKALEAITTASENIGKMVASLQSDIIESQACQDMQNEQKVYAKIQATHKQRELANKSWEDFLARTSNAKTLKKAKSLQEKAIEASRYHKRPQNAIFHQTHIKGLNTTVPSGGVVTVESTPARLVGGPLVDTDIALKKLPIRGGALQRVKAVKIVDAPKKSIPT

SEQ ID NO: 26294 - protein, 510 aa, Artificial Sequence; identical to SEQ ID NO: 26293
  Synthetic polypeptide

SEQ ID NO: 26295 - protein, 201 aa, Artificial Sequence
  Synthetic polypeptide
LTPVIPTLSRQEDHLRPEVQDQPGQHDPFFSHGNSFHGTGGRGNKFAQMRYSLRLLRAVVYLEDETVNKDLCEKGTIQQMIGIFKNIISKPNEKEEAIVLEIQSDILLILSGLCENHIQRKEIFGTEGVDIVLHVMKTDPRKLQSGLGYNVLLFSTLDSIWCCILGCYPSEDYFLEKEGIFLLLDLLAKDQTAASLLIKLW

SEQ ID NO: 26296 - protein, 31 aa, Artificial Sequence
  Synthetic polypeptide
CQRHSNQSDSILNEGYENEAETCWAAFSERV

SEQ ID NO: 26297 - protein, 31 aa, Artificial Sequence; identical to SEQ ID NO: 26296
  Synthetic polypeptide

SEQ ID NO: 26298 - protein, 31 aa, Artificial Sequence; identical to SEQ ID NO: 26296
  Synthetic polypeptide

SEQ ID NO: 26299 - protein, 31 aa, Artificial Sequence; identical to SEQ ID NO: 26296
  Synthetic polypeptide

SEQ ID NO: 26300 - protein, 31 aa, Artificial Sequence; identical to SEQ ID NO: 26296
  Synthetic polypeptide

SEQ ID NO: 26301 - protein, 31 aa, Artificial Sequence; identical to SEQ ID NO: 26296
  Synthetic polypeptide

SEQ ID NO: 26302 - protein, 31 aa, Artificial Sequence; identical to SEQ ID NO: 26296
  Synthetic polypeptide

SEQ ID NO: 26303 - protein, 27 aa, Artificial Sequence
  Synthetic polypeptide
MRATKMRLRLAGLPSQKGSEKPSRKPQ

SEQ ID NO: 26304 - protein, 27 aa, Artificial Sequence
  Synthetic polypeptide
MRATKMRLRLAGLPSQKGSEKPSRKPQ

SEQ ID NO: 26305 - protein, 27 aa, Artificial Sequence
  Synthetic polypeptide
MRATKMRLRLAGLPSQKGSEKPSRKPQ

SEQ ID NO: 26306 - protein, 27 aa, Artificial Sequence
  Synthetic polypeptide
MRATKMRLRLAGLPSQKGSEKPSRKPQ

SEQ ID NO: 26307 - protein, 27 aa, Artificial Sequence
  Synthetic polypeptide
MRATKMRLRLAGLPSQKGSEKPSRKPQ

SEQ ID NO: 26308 - protein, 27 aa, Artificial Sequence
  Synthetic polypeptide
MRATKMRLRLAGLPSQKGSEKPSRKPQ

SEQ ID NO: 26309 - protein, 27 aa, Artificial Sequence
  Synthetic polypeptide
MRATKMRLRLAGLPSQKGSEKPSRKPQ

SEQ ID NO: 26310 - protein, 325 aa, Artificial Sequence
  Synthetic polypeptide
DLLGCLLRKGLKSPQESLSDLGAIESLRVPGKEEFRELREQPSDPQAEQELINSIEQVYFSVDSFDIVKYELEKLPPVLNLQELEAYRDKLKQQQAAVSKKVADLILEKQPAYVKELERVTSLQTGLQLAAVICTNGRRHLNIAKEGFTQASLGLLANQRKRQLLIGLLKSLRTIKTLQRTDVRLSEMLEEEDYPGAIQLCLECQKAASTFKHYSCISELNSKLQDTLEQIEEQLDVALSKICKNFDINHYTKVQQAYRLLGKTQTAMDQLHMHFTQAIHNTVFQVVLGYVELCAGNTDTKFQKLQYKDLCTVCSDLITIHISLL

SEQ ID NO: 26311 - protein, 962 aa, Artificial Sequence
  Synthetic polypeptide
DLLGCLLRKGLKSPQESLSDLGAIESLRVPGKEEFRELREQPSDPQAEQELINSIEQVYFSVDSFDIVKYELEKLPPVLNLQELEAYRDKLKQQQAAVSKKVADLILEKQPAYVKELERVTSLQTGLQLAAVICTNGRRHLNIAKEGFTQASLGLLANQRKRQLLIGLLKSLRTIKTLQRTDVRLSEMLEEEDYPGAIQLCLECQKAASTFKHYSCISELNSKLQDTLEQIEEQLDVALSKICKNFDINHYTKVQQAYRLLGKTQTAMDQLHMHFTQAIHNTVFQVVLGYVELCAGNTDTKFQKLQYKDLCTHVTPDSYIPCLADLCKALWEVMLSYYRTMEWHEKHDNEDTASASEGSNMIGTEETNFDRGYIKKKLEHGLTRIWQDVQLKVKTYLLGTDLSIFKYDDFIFVLDIISRLMQVGEEFCGSKSEVLQESIRKQSVNYFKNYHRTRLDELRMFLENETWELCPVKSNFSILQLHEFKFMEQSRSPSVSPSKQPVSTSSKTVTLFEQYCSGGNPFEIQANHKDEETEDVLASNGYESDEQEKSAYQEYDSDSDVPEELKRDYVDEQTGDGPVKSVSRETLKSRKKSDYSLNKVNAPILTNTTLNVIRLVGKYMQMMNILKPIAFDVIHFMSQLFDYYLYAIYTFFGRNDSLESTGLGLSSSRLRTTLNRIQESLIDLEVSADPTATLTAAEERKEKVPSPHLSHLVVLTSGDTLYGLAERVVATESLVFLAEQFEFLQPHLDAVMPAVKKPFLQQFYSQTVSTASELRKPIYWIVAGKALDYEQMLLLMANVKWDVKEIMSQHNIYVDALLKEFEQFNRRLNEVSKRVRIPLPVSNILWEHCIRLANRTIVEGYANVKKCSNEGRALMQLDFQQFLMKLEKLTDIRPIPDKEFVETYIKAYYLTENDMERWIKEHREYSTKQLTNLVNVCLGSHINKKARQKLLAAIDDIDRPKR

SEQ ID NO: 26312 - protein, 35 aa, Artificial Sequence
  Synthetic polypeptide
DLLGCLLRKGLKSPQESLSDLGAIESLRVPGKLEP

SEQ ID NO: 26313 - protein, 37 aa, Artificial Sequence
  Synthetic polypeptide
DLLGCLLRKGLKSPQESLSDLGAIESLRVPGKVLSYT

SEQ ID NO: 26314 - protein, 37 aa, Artificial Sequence; identical to SEQ ID NO: 26313
  Synthetic polypeptide

SEQ ID NO: 26315 - protein, 187 aa, Artificial Sequence
  Synthetic polypeptide
DLLGCLLRKGLKSPQESLSDLGAIESLRVPGKEEFRELREQPSDPQAEQELINSIEQVYFSVDSFDIVKYELELPPVLNLQELEAYRDKLKQQQAAVSKKVADLILEKQPAYVKELERVTSLQTGLQLAAVICTNGRRHLNIAKEGFTQASLGLLANQRKRQLLIGLLKSLRTIKTLQRTDVRLSEM

SEQ ID NO: 26316 - protein, 682 aa, Artificial Sequence
  Synthetic polypeptide
DLLGCLLRKGLKSPQESLSDLGAIESLRVPGKHVTPDSYIPCLADLCKALWEVMLSYYRTMEWHEKHDNEDTASASEGSNMIGTEETNFDRGYIKKKLEHGLTRIWQDVQLKVKTYLLGTDLSIFKYDDFIFVLDIISRLMQVGEEFCGSKSEVLQESIRKQSVNYFKNYHRTRLDELRMFLENETWELCPVKSNFSILQLHEFKFMEQSRSPSVSPSKQPVSTSSKTVTLFEQYCSGGNPFEIQANHKDEETEDVLASNGYESDEQEKSAYQEYDSDSDVPEELKRDYVDEQTGDGPVKSVSRETLKSRKKSDYSLNKVNAPILTNTTLNVIRLVGKYMQMMNILKPIAFDVIHFMSQLFDYYLYAIYTFFGRNDSLESTGLGLSSSRLRTTLNRIQESLIDLEVSADPTATLTAAEERKEKVPSPHLSHLVVLTSGDTLYGLAERVVATESLVFLAEQFEFLQPHLDAVMPAVKKPFLQQFYSQTVSTASELRKPIYWIVAGKALDYEQMLLLMANVKWDVKEIMSQHNIYVDALLKEFEQFNRRLNEVSKRVRIPLPVSNILWEHCIRLANRTIVEGYANVKKCSNEGRALMQLDFQQFLMKLEKLTDIRPIPDKEFVETYIKAYYLTENDMERWIKEHREYSTKQLTNLVNVCLGSHINKKARQKLLAAIDDIDRPKR

SEQ ID NO: 26317 - protein, 43 aa, Artificial Sequence
  Synthetic polypeptide
PHLSLFHFRSPGFCSTETTVTKVTSDFQETRLARRNYQCWQPV

SEQ ID NO: 26318 - protein, 171 aa, Artificial Sequence
  Synthetic polypeptide
LTFPSSTFAHLDFVPLKPLLRKSPVTSKKHVWLGETINAGSQFEYNVEGVTSKEMATQLAFMRLLANYASQNITYHCKNSIAYMDEETGNLKKAVILQGSNDVELVAEGNSRFTYTVLVDGCSKKTNEWGKTIIEYKTNKPSRLPFLDIAPLDIGGADQEFFVDIGPVCFK

SEQ ID NO: 26319 - protein, 7 aa, Artificial Sequence
  Synthetic polypeptide
LPRNTSG

SEQ ID NO: 26320 - protein, 65 aa, Artificial Sequence
  Synthetic polypeptide
GRVQWPTPVIPALWQAECTVFSPRYTPIGMYTHQQVSSLFMFWKENILRGNFHLTQNLARLVMIP

SEQ ID NO: 26321 - protein, 65 aa, Artificial Sequence; identical to SEQ ID NO: 26320
  Synthetic polypeptide

SEQ ID NO: 26322 - protein, 65 aa, Artificial Sequence; identical to SEQ ID NO: 26320
  Synthetic polypeptide

SEQ ID NO: 26323 - protein, 65 aa, Artificial Sequence; identical to SEQ ID NO: 26320
  Synthetic polypeptide

SEQ ID NO: 26324 - protein, 65 aa, Artificial Sequence; identical to SEQ ID NO: 26320
  Synthetic polypeptide

SEQ ID NO: 26325 - protein, 38 aa, Artificial Sequence
  Synthetic polypeptide
SQHFGRPSVQYFLQGTLRSECIPISRCPLCSCFGKRIF

SEQ ID NO: 26326 - protein, 38 aa, Artificial Sequence; identical to SEQ ID NO: 26325
  Synthetic polypeptide

SEQ ID NO: 26327 - protein, 38 aa, Artificial Sequence; identical to SEQ ID NO: 26325
  Synthetic polypeptide

SEQ ID NO: 26328 - protein, 38 aa, Artificial Sequence; identical to SEQ ID NO: 26325
  Synthetic polypeptide

SEQ ID NO: 26329 - protein, 38 aa, Artificial Sequence; identical to SEQ ID NO: 26325
  Synthetic polypeptide

SEQ ID NO: 26330 - protein, 417 aa, Artificial Sequence
  Synthetic polypeptide
PGAVAHTCNPSTLAGRVYSIFSKVHSDRNVYPSAGVLFVHVLEREYFKGEFPPYPKPGEISNDPITFNTNLMGYPDRPGWLRYIQRTPYSDGVLYGSPTAENVGKPTIIEITAYNRRTFETARHNLIINIMSAEDFPLPYQAEFFIKNMNVEEMLASEVLGDFLGAVKNVWQPERLNAINITSALDRGGRVPLPINDLKEGVYVMVGADVPFSSCLREVENPQNQLRCSQEMEPVITCDKKFRTQFYIDWCKISLVDKTKQVSTYQEVIRGEGILPDGGEYKPPSDSLKSRDYYTDFLITLAVPSAVALVLFLILAYIMCCRREGVEKRNMQTPDIQLVHHSAIQKSTKELRDMSKNREIAWPLSTLPVFHPVTGEIIPPLHTDNYDSTNMPLMQTQQNLPHQTQIPQQQTTGKWYP

SEQ ID NO: 26331 - protein, 442 aa, Artificial Sequence
  Synthetic polypeptide
PGAVAHTCNPSTLAGRVYSIFSKVHSDRNVYPSAGVLFVHVLEREYFKGEFPPYPKPGEISNDPITFNTNLMGYPDRPGWLRYIQRTPYSDGVLYGSPTAENVGKPTIIEITAYNRRTFETARHNLIINIMSAEDFPLPYQAEFFIKNMNVEEMLASEVLGDFLGAVKNVWQPERLNAINITSALDRGGRVPLPINDLKEGVYVMVGADVPFSSCLREVENPQNQLRCSQEMEPVITCDKKFRTQFYIDWCKISLVDKTKQVSTYQEVIRGEGILPDGGEYKPPSDSLKSRDYYTDFLITLAVPSAVALVLFLILAYIMCCRREGVEKRNMQTPDIQLVHHSAIQKSTKELRDMSKNREIAWPLSTLPVFHPVTGEIIPPLHTDNYDSTNMPLMQTQQWSFAPVAQAGVQWSDLGSLQPPPPRNLPHQTQIPQQQTTGKWYP

SEQ ID NO: 26332 - protein, 408 aa, Artificial Sequence
  Synthetic polypeptide
PGAVAHTCNPSTLAGRVYSIFSKVHSDRNVYPSAGVLFVHVLEREYFKGEFPPYPKPGEISNDPITFNTNLMGYPDRPGWLRYIQRTPYSDGVLYGSPTAENVGKPTIIEITAYNRRTFETARHNLIINIMSAEDFPLPYQAEFFIKNMNVEEMLASEVLGDFLGAVKNVWQPERLNAINITSALDRGGRVPLPINDLKEGVYVMVGADVPFSSCLREVENPQNQLRCSQEMEPVITCDKKFRTQFYIDWCKISLVDKTKQVSTYQEVIRGEGILPDGGEYKPPSDSLKSRDYYTDFLITLAVPSAVALVLFLILAYIMCCRREGVIQLVHHSAIQKSTKELRDMSKNREIAWPLSTLPVFHPVTGEIIPPLHTDNYDSTNMPLMQTQQNLPHQTQIPQQQTTGKWYP

SEQ ID NO: 26333 - protein, 431 aa, Artificial Sequence
  Synthetic polypeptide
PGAVAHTCNPSTLAGRVYSIFSKVHSDRNVYPSAGVLFVHVLEREYFKGEFPPYPKPGEISNDPITFNTNLMGYPDRPGWLRYIQRTPYSDGVLYGSPTAENVGKPTIIEITAYNRRTFETARHNLIINIMSAEDFPLPYQAEFFIKNMNVEEMLASEVLGDFLGAVKNVWQPERLNAINITSALDRGGRVPLPINDLKEGVYVMVGADVPFSSCLREVENPQNQLRCSQEMEPVITCDKKFRTQFYIDWCKISLVDKTKQVSTYQEVIRGEGILPDGGEYKPPSDSLKSRDYYTDFLITLAVPSAVALVLFLILAYIMCCRREGVIQLVHHSAIQKSTKELRDMSKNREIAWPLSTLPVFHPVTGEIIPPLHTDNYDSTNMPLMQTQQNLPHQTQIPQQQTTGDFRLTTFQRFEVNGIPEERKLTEAMNL

SEQ ID NO: 26334 - protein, 415 aa, Artificial Sequence
  Synthetic polypeptide
PGAVAHTCNPSTLAGRVYSIFSKVHSDRNVYPSAGVLFVHVLEREYFKGEFPPYPKPGEISNDPITFNTNLMGYPDRPGWLRYIQRTPYSDGVLYGSPTAENVGKPTIIEITAYNRRTFETARHNLIINIMSAEDFPLPYQAEFFIKNMNVEEMLASEVLGDFLGAVKNVWQPERLNAINITSALDRGGRVPLPINDLKEGVYVMVGADVPFSSCLREVENPQNQLRCSQEMEPVITCDKKFRTQFYIDWCKISLVDKTKQVSTYQEVIRGEGILPDGGEYKPPSDSLKSRDYYTDFLITLAVPSAVALVLFLILAYIMCCRREGVEKRNMQTPDIQLVHHSAIQKSTKELRDMSKNREIAWPLSTLPVFHPVTGEIIPPLHTDNYDSTNMPLMQTQQNLPHQTQIPQQQTTGEC

SEQ ID NO: 26335 - protein, 20 aa, Artificial Sequence
  Synthetic polypeptide
GRVQWPTPVIPALWQAELFY

SEQ ID NO: 26336 - protein, 14 aa, Artificial Sequence
  Synthetic polypeptide
SQHFGRPSFFIKLC

SEQ ID NO: 26337 - protein, 451 aa, Artificial Sequence
  Synthetic polypeptide
PGAVAHTCNPSTLAGRAFLLSCADGINGTVNWKTRQANNFIISRKMAAGMKDVYSIFSKVHSDRNVYPSAGVLFVHVLEREYFKGEFPPYPKPGEISNDPITFNTNLMGYPDRPGWLRYIQRTPYSDGVLYGSPTAENVGKPTIIEITAYNRRTFETARHNLIINIMSAEDFPLPYQAEFFIKNMNVEEMLASEVLGDFLGAVKNVWQPERLNAINITSALDRGGRVPLPINDLKEGVYVMVGADVPFSSCLREVENPQNQLRCSQEMEPVITCDKKFRTQFYIDWCKISLVDKTKQVSTYQEVIRGEGILPDGGEYKPPSDSLKSRDYYTDFLITLAVPSAVALVLFLILAYIMCCRREGVEKRNMQTPDIQLVHHSAIQKSTKELRDMSKNREIAWPLSTLPVFHPVTGEIIPPLHTDNYDSTNMPLMQTQQNLPHQTQIPQQQTTGEC

SEQ ID NO: 26338 - protein, 44 aa, Artificial Sequence
  Synthetic polypeptide
TFLPLLAPVILLLCLLLPGKCLLRPHLKSHLSLHSHCRCPFLGT

SEQ ID NO: 26339 - protein, 44 aa, Artificial Sequence; identical to SEQ ID NO: 26338
  Synthetic polypeptide

SEQ ID NO: 26340 - protein, 44 aa, Artificial Sequence; identical to SEQ ID NO: 26338
  Synthetic polypeptide

SEQ ID NO: 26341 - protein, 128 aa, Artificial Sequence
  Synthetic polypeptide
FCSCACFCLGSASSVLISNLISLYTATADAPSLVLELDTLVDNLSIDPSSGDIWVGCHPNGQKLFVYDPNNPPSSEVLRIQNILSEKPTVTTVYANNGSVLQGSSVASVYDGKLLIGTLYHRALYCEL

SEQ ID NO: 26342 - protein, 128 aa, Artificial Sequence; identical to SEQ ID NO: 26341
  Synthetic polypeptide

SEQ ID NO: 26343 - protein, 128 aa, Artificial Sequence; identical to SEQ ID NO: 26341
  Synthetic polypeptide

SEQ ID NO: 26344 - protein, 85 aa, Artificial Sequence
  Synthetic polypeptide
PTSLFYYFHAFYALDKELIVLNIPSSSCSCDSALVLASAWEVPPPSSSQISSLFTQPLQMPLPWYLSWIHWWIIYLLILPRGTSG

SEQ ID NO: 26345 - protein, 85 aa, Artificial Sequence; identical to SEQ ID NO: 26344
  Synthetic polypeptide

SEQ ID NO: 26346 - protein, 85 aa, Artificial Sequence; identical to SEQ ID NO: 26344
  Synthetic polypeptide

SEQ ID NO: 26347 - protein, 60 aa, Artificial Sequence
  Synthetic polypeptide
GLFPLLLGTSPCCRHVKKGVFSSPSTKIVSFLKPPQPHGTKLALKILTYFPMVWLFLVWV

SEQ ID NO: 26348 - protein, 60 aa, Artificial Sequence; identical to SEQ ID NO: 26347
  Synthetic polypeptide

SEQ ID NO: 26349 - protein, 60 aa, Artificial Sequence; identical to SEQ ID NO: 26347
  Synthetic polypeptide

SEQ ID NO: 26350 - protein, 60 aa, Artificial Sequence; identical to SEQ ID NO: 26347
  Synthetic polypeptide

SEQ ID NO: 26351 - protein, 11 aa, Artificial Sequence
  Synthetic polypeptide
SLPNHTEQSWL

SEQ ID NO: 26352 - protein, 11 aa, Artificial Sequence
  Synthetic polypeptide
SLPNHTEQSWL

SEQ ID NO: 26353 - protein, 11 aa, Artificial Sequence
  Synthetic polypeptide
SLPNHTEQSWL

SEQ ID NO: 26354 - protein, 11 aa, Artificial Sequence
  Synthetic polypeptide
SLPNHTEQSWL

SEQ ID NO: 26355 - protein, 355 aa, Artificial Sequence
  Synthetic polypeptide
VLMRSDGFIRAFPPFARHFSLLPPCEEGCVFFPFHQDCKFPEASPTTRNKAGSEDIDILPNGLAFFSVGLKFPGLHSFAPDKPGGILMMDLKEEKPRARELRISRGFDLASFNPHGISTFIDNDDTVYLFVVNHPEFKNTVEIFKFEEAENSLLHLKTVKHELLPSVNDITAVGPAHFYATNDHYFSDPFLKYLETYLNLHWANVVYYSPNEVKVVAEGFDSANGINISPDDKYIYVADILAHEIHVLEKHTNMNLTQLKVLELDTLVDNLSIDPSSGDIWVGCHPNGQKLFVYDPNNPPSSEVLRIQNILSEKPTVTTVYANNGSVLQGSSVASVYDGKLLIGTLYHRALYCEL

SEQ ID NO: 26356 - protein, 355 aa, Artificial Sequence; identical to SEQ ID NO: 26355
  Synthetic polypeptide

SEQ ID NO: 26357 - protein, 220 aa, Artificial Sequence
  Synthetic polypeptide
VLMRSDGFIRAFPPFARHFSLLPPCEEGCVFFPFHQDCKFPEASPTTRNKAGSEDIDILPNGLAFFSVGLKFPGLHSFAPDKPGGILMMDLKEEKPRARELRISRGFDLASFNPHGISTFIDNDDTVYLFVVNHPEFKNTVEIFKFEEAENSLLHLKTVKHELLPSVNDITAVGPAHFYATNDHYFSDPFLKYLETYLNLHWANVVYYSPNEVKVVYLCC

SEQ ID NO: 26358 - protein, 343 aa, Artificial Sequence
  Synthetic polypeptide
VLMRSDGFIRAFPPFARHFSLLPPCEEGCVFFPFHQDCKFPEASPTTRNKAGSEDIDILPNGLAFFSVGLKFPGLHSFAPDKPGGILMMDLKEEKPRARELRISRGFDLASFNPHGISTFIDNEFKNTVEIFKFEEAENSLLHLKTVKHELLPSVNDITAVGPAHFYATNDHYFSDPFLKYLETYLNLHWANVVYYSPNEVKVVAEGFDSANGINISPDDKYIYVADILAHEIHVLEKHTNMNLTQLKVLELDTLVDNLSIDPSSGDIWVGCHPNGQKLFVYDPNNPPSSEVLRIQNILSEKPTVTTVYANNGSVLQGSSVASVYDGKLLIGTLYHRALYCEL

SEQ ID NO: 26359 - protein, 48 aa, Artificial Sequence
  Synthetic polypeptide
GLFPLLLGTSPCCRHVKKGVFSSPSTKIKLALKILTYFPMVWLFLVWV

SEQ ID NO: 26360 - protein, 48 aa, Artificial Sequence; identical to SEQ ID NO: 26359
  Synthetic polypeptide

SEQ ID NO: 26361 - protein, 48 aa, Artificial Sequence; identical to SEQ ID NO: 26359
  Synthetic polypeptide

SEQ ID NO: 26362 - protein, 48 aa, Artificial Sequence; identical to SEQ ID NO: 26359
  Synthetic polypeptide

SEQ ID NO: 26363 - protein, 15 aa, Artificial Sequence
  Synthetic polypeptide
RRVCFLPLPPRLSWL

SEQ ID NO: 26364 - protein, 15 aa, Artificial Sequence
  Synthetic polypeptide
RRVCFLPLPPRLSWL

SEQ ID NO: 26365 - protein, 15 aa, Artificial Sequence
  Synthetic polypeptide
RRVCFLPLPPRLSWL

SEQ ID NO: 26366 - protein, 15 aa, Artificial Sequence
  Synthetic polypeptide
RRVCFLPLPPRLSWL

SEQ ID NO: 26367 - protein, 334 aa, Artificial Sequence
  Synthetic polypeptide
MNAWRNRLKASREVESVDLPHCHLIKGIEAGSEDIDILPNGLAFFSVGLKFPGLHSFAPDKPGGILMMDLKEEKPRARELRISRGFDLASFNPHGISTFIDNDDTVYLFVVNHPEFKNTVEIFKFEEAENSLLHLKTVKHELLPSVNDITAVGPAHFYATNDHYFSDPFLKYLETYLNLHWANVVYYSPNEVKVVAEGFDSANGINISPDDKYIYVADILAHEIHVLEKHTNMNLTQLKVLELDTLVDNLSIDPSSGDIWVGCHPNGQKLFVYDPNNPPSSEVLRIQNILSEKPTVTTVYANNGSVLQGSSVASVYDGKLLIGTLYHRALYCEL

SEQ ID NO: 26368 - protein, 334 aa, Artificial Sequence; identical to SEQ ID NO: 26367
  Synthetic polypeptide

SEQ ID NO: 26369 - protein, 12 aa, Artificial Sequence
  Synthetic polypeptide
MHGEIDLKPPEK

SEQ ID NO: 26370 - protein, 12 aa, Artificial Sequence
  Synthetic polypeptide
MHGEIDLKPPEK

SEQ ID NO: 26371 - protein, 12 aa, Artificial Sequence
  Synthetic polypeptide
MHGEIDLKPPEK

SEQ ID NO: 26372 - protein, 12 aa, Artificial Sequence
  Synthetic polypeptide
MHGEIDLKPPEK

SEQ ID NO: 26373 - protein, 12 aa, Artificial Sequence
  Synthetic polypeptide
MHGEIDLKPPEK

SEQ ID NO: 26374 - protein, 16 aa, Artificial Sequence
  Synthetic polypeptide
FTGLFEELNECMEKST

SEQ ID NO: 26375 - protein, 16 aa, Artificial Sequence
  Synthetic polypeptide
FTGLFEELNECMEKST

SEQ ID NO: 26376 - protein, 16 aa, Artificial Sequence
  Synthetic polypeptide
FTGLFEELNECMEKST

SEQ ID NO: 26377 - protein, 16 aa, Artificial Sequence
  Synthetic polypeptide
FTGLFEELNECMEKST

SEQ ID NO: 26378 - protein, 16 aa, Artificial Sequence
  Synthetic polypeptide
FTGLFEELNECMEKST

SEQ ID NO: 26379 - protein, 199 aa, Artificial Sequence
  Synthetic polypeptide
MNAWRNRLKASREVESVDLPHCHLIKGIEAGSEDIDILPNGLAFFSVGLKFPGLHSFAPDKPGGILMMDLKEEKPRARELRISRGFDLASFNPHGISTFIDNDDTVYLFVVNHPEFKNTVEIFKFEEAENSLLHLKTVKHELLPSVNDITAVGPAHFYATNDHYFSDPFLKYLETYLNLHWANVVYYSPNEVKVVYLCC

SEQ ID NO: 26380 - protein, 322 aa, Artificial Sequence
  Synthetic polypeptide
MNAWRNRLKASREVESVDLPHCHLIKGIEAGSEDIDILPNGLAFFSVGLKFPGLHSFAPDKPGGILMMDLKEEKPRARELRISRGFDLASFNPHGISTFIDNEFKNTVEIFKFEEAENSLLHLKTVKHELLPSVNDITAVGPAHFYATNDHYFSDPFLKYLETYLNLHWANVVYYSPNEVKVVAEGFDSANGINISPDDKYIYVADILAHEIHVLEKHTNMNLTQLKVLELDTLVDNLSIDPSSGDIWVGCHPNGQKLFVYDPNNPPSSEVLRIQNILSEKPTVTTVYANNGSVLQGSSVASVYDGKLLIGTLYHRALYCEL

SEQ ID NO: 26381 - protein, 30 aa, Artificial Sequence
  Synthetic polypeptide
MNAWRNRLKASREVESVDLPHCHLIKGIVW

SEQ ID NO: 26382 - protein, 11 aa, Artificial Sequence
  Synthetic polypeptide
HYSAQQAALLL

SEQ ID NO: 26383 - protein, 11 aa, Artificial Sequence
  Synthetic polypeptide
HYSAQQAALLL

SEQ ID NO: 26384 - protein, 11 aa, Artificial Sequence
  Synthetic polypeptide
HYSAQQAALLL

SEQ ID NO: 26385 - protein, 11 aa, Artificial Sequence
  Synthetic polypeptide
HYSAQQAALLL

SEQ ID NO: 26386 - protein, 11 aa, Artificial Sequence
  Synthetic polypeptide
HYSAQQAALLL

SEQ ID NO: 26387 - protein, 11 aa, Artificial Sequence
  Synthetic polypeptide
HYSAQQAALLL

SEQ ID NO: 26388 - protein, 200 aa, Artificial Sequence
  Synthetic polypeptide
QYLKIIHVLTEQFPLLGIYAKDIPAKIRQKTYGEGHSLKDYLNSKRMNTTQKSLSVQCCVNQKYGTSTQESNIIQHNKPLYSFEDNADYVYDVMWSPVHPALFACVDGMGRLDLWNLNNDTEVPTASVAIEGASALNRVRWAQAGKEVAVGDSEGRIWVYDVGELAVPHNDEWTRFARTLVEIRANRADSEEEGTVELSA

SEQ ID NO: 26389 - protein, 200 aa, Artificial Sequence; identical to SEQ ID NO: 26388
  Synthetic polypeptide

SEQ ID NO: 26390 - protein, 200 aa, Artificial Sequence; identical to SEQ ID NO: 26388
  Synthetic polypeptide

SEQ ID NO: 26391 - protein, 200 aa, Artificial Sequence; identical to SEQ ID NO: 26388
  Synthetic polypeptide

SEQ ID NO: 26392 - protein, 200 aa, Artificial Sequence; identical to SEQ ID NO: 26388
  Synthetic polypeptide

SEQ ID NO: 26393 - protein, 75 aa, Artificial Sequence
  Synthetic polypeptide
IKSMVPPPKRVTLFSTTSRSTPLKTMQTMCTMSCGPPCILRFLPAWTGWGAWTSGTSTMTPRFQQQVWPLRGHPP

SEQ ID NO: 26394 - protein, 75 aa, Artificial Sequence; identical to SEQ ID NO: 26393
  Synthetic polypeptide

SEQ ID NO: 26395 - protein, 75 aa, Artificial Sequence; identical to SEQ ID NO: 26393
  Synthetic polypeptide

SEQ ID NO: 26396 - protein, 75 aa, Artificial Sequence; identical to SEQ ID NO: 26393
  Synthetic polypeptide

SEQ ID NO: 26397 - protein, 75 aa, Artificial Sequence; identical to SEQ ID NO: 26393
  Synthetic polypeptide

SEQ ID NO: 26398 - protein, 75 aa, Artificial Sequence; identical to SEQ ID NO: 26393
  Synthetic polypeptide

SEQ ID NO: 26399 - protein, 194 aa, Artificial Sequence
  Synthetic polypeptide
QYLKIIHVLTEQFPLLGIYAKDIPAKIRQKTYGEGHSLKDYLNSKRMNTTQKSLSVQCCVNQKYGTSTQESNIIQHNKPLYSFEDNADYVYDVMWSPVHPALFACVDGMGRLDLWNLNNDTEVPTASVAIEGASALNRVRWAQAGKEVAVGDSEGRIWVYDVGEGLAMLPGWSQNSWTQAILLCWPPKVLGLQT

SEQ ID NO: 26400 - protein, 30 aa, Artificial Sequence
  Synthetic polypeptide
PTASNRAVTLTAWPKVPFLGIHEAKNPRWL

SEQ ID NO: 26401 - protein, 30 aa, Artificial Sequence; identical to SEQ ID NO: 26400
  Synthetic polypeptide

SEQ ID NO: 26402 - protein, 30 aa, Artificial Sequence; identical to SEQ ID NO: 26400
  Synthetic polypeptide

SEQ ID NO: 26403 - protein, 29 aa, Artificial Sequence
  Synthetic polypeptide
HSPHGPKFHSLESMKPRTPGGFNQESRSS

SEQ ID NO: 26404 - protein, 29 aa, Artificial Sequence
  Synthetic polypeptide
HSPHGPKFHSLESMKPRTPGGFNQESRSS

SEQ ID NO: 26405 - protein, 29 aa, Artificial Sequence
  Synthetic polypeptide
HSPHGPKFHSLESMKPRTPGGFNQESRSS

SEQ ID NO: 26406 - protein, 675 aa, Artificial Sequence
  Synthetic polypeptide
SQEPQVALTKRADPAELRTIFLKYASIEKNGEFFMSPNDFVTRYLNIFGESQPNPKTVELLSGVVDQTKDGLISFQEFVAFESVLCAPDALFMVAFQLFDKAGKGEVTFEDVKQVFGQTTIHQHIPFNWDSEFVQLHFGKERKRHLTYAEFTQFLLEIQLEHAKQAFVQRDNARTGRVTAIDFRDIMVTIRPHVLTPFVEECLVAAAGGTTSHQVSFSYFNGFNSLLNNMELIRKIYSTLAGTRKDVEVTKEEFVLAAQKFGQVTPMEVDILFQLADLYEPRGRMTLADIERIAPLEEGTLPFNLAEAQRQKASGDSARPVLLQVAESAYRFGLGSVAGAVGATAVYPIDLVKTRMQNQRSTGSFVGELMYKNSFDCFKKVLRYEGFFGLYRGLLPQLLGVAPEKAIKLTVNDFVRDKFMHKDGSVPLAAEILAGGCAGGSQVIFTNPLEIVKIRLQVAGEITTGPRVSALSVVRDLGFFGIYKGAKACFLRDIPFSAIYFPCYAHVKASFANEDGQVSPGSLLLAGAIAGMPAASLVTPADVIKTRLQVAARAGQTTYSGVIDCFRKILREEGPKALWKGAGARVFRSSPQFGVTLLTYELLQRWFYIDFGGVKPMGSEPVPKSRINLPAPNPDHVGGYKLAVATFAGIENKFGLYLPLFKPSVSTSKAIGGGP

SEQ ID NO: 26407 - protein, 676 aa, Artificial Sequence
  Synthetic polypeptide
SQEPQVALTKRADPAELRTIFLKYASIEKNGEFFMSPNDFVTRYLNIFGESQPNPKTVELLSGVVDQTKDGLISFQEFVAFESVLCAPDALFMVAFQLFDKAGKGEVTFEDVKQVFGQTTIHQHIPFNWDSEFVQLHFGKERKRHLTYAEFTQFLLEIQLEHAKQAFVQRDNARTGRVTAIDFRDIMVTIRPHVLTPFVEECLVAAAGGTTSHQVSFSYFNGFNSLLNNMELIRKIYSTLAGTRKDVEVTKEEFVLAAQKFGQVTPMEVDILFQLADLYEPRGRMTLADIERIAPLEEGTLPFNLAEAQRQQKASGDSARPVLLQVAESAYRFGLGSVAGAVGATAVYPIDLVKTRMQNQRSTGSFVGELMYKNSFDCFKKVLRYEGFFGLYRGLLPQLLGVAPEKAIKLTVNDFVRDKFMHKDGSVPLAAEILAGGCAGGSQVIFTNPLEIVKIRLQVAGEITTGPRVSALSVVRDLGFFGIYKGAKACFLRDIPFSAIYFPCYAHVKASFANEDGQVSPGSLLLAGAIAGMPAASLVTPADVIKTRLQVAARAGQTTYSGVIDCFRKILREEGPKALWKGAGARVFRSSPQFGVTLLTYELLQRWFYIDFGGVKPMGSEPVPKSRINLPAPNPDHVGGYKLAVATFAGIENKFGLYLPLFKPSVSTSKAIGGGP

SEQ ID NO: 26408 - protein, 73 aa, Artificial Sequence
  Synthetic polypeptide
SQEPQVALTKRADPAELRTIFLKYASIEKNGEFFMSPNDFVTRYLNIFGESQPNPKTVELLSGVVDQTKDGGC

SEQ ID NO: 26409 - protein, 47 aa, Artificial Sequence
  Synthetic polypeptide
GTGLRTGDWAGLDEDEDAHVWEDNWDDDNVEDDFSNQLRAGYSELEE

SEQ ID NO: 26410 - protein, 7 aa, Artificial Sequence
  Synthetic polypeptide
GLETGLA

SEQ ID NO: 26411 - protein, 7 aa, Artificial Sequence
  Synthetic polypeptide
GLETGLA

SEQ ID NO: 26412 - protein, 7 aa, Artificial Sequence
  Synthetic polypeptide
GLETGLA

SEQ ID NO: 26413 - protein, 7 aa, Artificial Sequence
  Synthetic polypeptide
GLETGLA

SEQ ID NO: 26414 - protein, 7 aa, Artificial Sequence
  Synthetic polypeptide
GLETGLA

SEQ ID NO: 26415 - protein, 34 aa, Artificial Sequence
  Synthetic polypeptide
LRLLPTEPEFSVMWRHLIPPLGNWLKDWRLGWLR

SEQ ID NO: 26416 - protein, 34 aa, Artificial Sequence; identical to SEQ ID NO: 26415
  Synthetic polypeptide

SEQ ID NO: 26417 - protein, 34 aa, Artificial Sequence; identical to SEQ ID NO: 26415
  Synthetic polypeptide

SEQ ID NO: 26418 - protein, 34 aa, Artificial Sequence; identical to SEQ ID NO: 26415
  Synthetic polypeptide

SEQ ID NO: 26419 - protein, 34 aa, Artificial Sequence; identical to SEQ ID NO: 26415
  Synthetic polypeptide

SEQ ID NO: 26420 - protein, 44 aa, Artificial Sequence
  Synthetic polypeptide
GTGLRTGDWAGLDEDEDAHVWEDNWDDDNVEDDFSNQLRCEKKP

SEQ ID NO: 26421 - protein, 71 aa, Artificial Sequence
  Synthetic polypeptide
GTGLRTGDWAGLDEDEDAHVWEDNWDDDNVEDDFSNQLRATVLLMILVCETPYGCYVLHQKGRMCSAFLCC

SEQ ID NO: 26422 - protein, 71 aa, Artificial Sequence; identical to SEQ ID NO: 26421
  Synthetic polypeptide

SEQ ID NO: 26423 - protein, 52 aa, Artificial Sequence
  Synthetic polypeptide
GTGLRTGDWAGLDEDEDAHVWEDNWDDDNVEDDFSNQLRAELEKHGYKMETS

SEQ ID NO: 26424 - protein, 13 aa, Artificial Sequence
  Synthetic polypeptide
GLPSHTEPLGWLR

SEQ ID NO: 26425 - protein, 13 aa, Artificial Sequence
  Synthetic polypeptide
GLPSHTEPLGWLR

SEQ ID NO: 26426 - protein, 13 aa, Artificial Sequence
  Synthetic polypeptide
GLPSHTEPLGWLR

SEQ ID NO: 26427 - protein, 13 aa, Artificial Sequence
  Synthetic polypeptide
GLPSHTEPLGWLR

SEQ ID NO: 26428 - protein, 13 aa, Artificial Sequence
  Synthetic polypeptide
GLPSHTEPLGWLR

SEQ ID NO: 26429 - protein, 75 aa, Artificial Sequence
  Synthetic polypeptide
HMLTLACCHVKPCLCFSFAFSHDCKFPEASPATQNHWAGLDEDEDAHVWEDNWDDDNVEDDFSNQLRAGYSELEE

SEQ ID NO: 26430 - protein, 29 aa, Artificial Sequence
  Synthetic polypeptide
NHAFASLLPSAMIVSFLRPPQPHRTTGLA

SEQ ID NO: 26431 - protein, 29 aa, Artificial Sequence
  Synthetic polypeptide
NHAFASLLPSAMIVSFLRPPQPHRTTGLA

SEQ ID NO: 26432 - protein, 29 aa, Artificial Sequence
  Synthetic polypeptide
NHAFASLLPSAMIVSFLRPPQPHRTTGLA

SEQ ID NO: 26433 - protein, 29 aa, Artificial Sequence
  Synthetic polypeptide
NHAFASLLPSAMIVSFLRPPQPHRTTGLA

SEQ ID NO: 26434 - protein, 29 aa, Artificial Sequence
  Synthetic polypeptide
NHAFASLLPSAMIVSFLRPPQPHRTTGLA

SEQ ID NO: 26435 - protein, 72 aa, Artificial Sequence
  Synthetic polypeptide
HMLTLACCHVKPCLCFSFAFSHDCKFPEASPATQNHWAGLDEDEDAHVWEDNWDDDNVEDDFSNQLRCEKKP

SEQ ID NO: 26436 - protein, 99 aa, Artificial Sequence
  Synthetic polypeptide
HMLTLACCHVKPCLCFSFAFSHDCKFPEASPATQNHWAGLDEDEDAHVWEDNWDDDNVEDDFSNQLRATVLLMILVCETPYGCYVLHQKGRMCSAFLCC

SEQ ID NO: 26437 - protein, 99 aa, Artificial Sequence; identical to SEQ ID NO: 26436
  Synthetic polypeptide

SEQ ID NO: 26438 - protein, 80 aa, Artificial Sequence
  Synthetic polypeptide
HMLTLACCHVKPCLCFSFAFSHDCKFPEASPATQNHWAGLDEDEDAHVWEDNWDDDNVEDDFSNQLRAELEKHGYKMETS

SEQ ID NO: 26439 - protein, 31 aa, Artificial Sequence
  Synthetic polypeptide
NPASTKNTKVSWAWWWAPVIPGVCNSVIATG

SEQ ID NO: 26440 - protein, 69 aa, Artificial Sequence
  Synthetic polypeptide
SQVYATALLQQANENRQNSTGKACFGTFLPEEKLNDFRDEQIGQLQELMQEATKPNRQFSISESMKPKF

SEQ ID NO: 26441 - protein, 56 aa, Artificial Sequence
  Synthetic polypeptide
LGMVVGACNPRCMQQRYCNRLTKTDKIQLEKHVLAPSSQKKNLMTFVMNKLDSCRS

SEQ ID NO: 26442 - protein, 92 aa, Artificial Sequence
  Synthetic polypeptide
SQHFGRPRYFRRSQFTAISFGCNGTEHDEEAESEDHLPAHCGLQQDLTQLCTGRCHHAAHPRGEGWLALWRTRRVQGEGLVPVVVHEVAGRK

SEQ ID NO: 26443 - protein, 208 aa, Artificial Sequence
  Synthetic polypeptide
GAVTHACNPSTLGGQGTSEDPSLQRSVSVATGLNMMKKQKVKTIFPHTAGSNKTLLSFAQGDVITLLIPEEKDGWLYGEHDVSKARGWFPSSYTKLLEENETEAVTVPTPSPTPVRSISTVNLSENSSVVIPPPDYLECLSMGAAADRRADSARTTSTFKAPASKPETAAPNDANGTAKPPFLSGENPFATVKLRPTVTNDRSAPIIR

SEQ ID NO: 26444 - protein, 29 aa, Artificial Sequence
  Synthetic polypeptide
LMPVIPALWEAKVLPKIPVYSDQFRLQRD

SEQ ID NO: 26445 - protein, 19 aa, Artificial Sequence
  Synthetic polypeptide
EAEESSRLSLLSHVLHLSL

SEQ ID NO: 26446 - protein, 19 aa, Artificial Sequence
  Synthetic polypeptide
EAEESSRLSLLSHVLHLSL

SEQ ID NO: 26447 - protein, 19 aa, Artificial Sequence
  Synthetic polypeptide
EAEESSRLSLLSHVLHLSL

SEQ ID NO: 26448 - protein, 19 aa, Artificial Sequence
  Synthetic polypeptide
EAEESSRLSLLSHVLHLSL

SEQ ID NO: 26449 - protein, 19 aa, Artificial Sequence
  Synthetic polypeptide
EAEESSRLSLLSHVLHLSL

SEQ ID NO: 26450 - protein, 47 aa, Artificial Sequence
  Synthetic polypeptide
LQHFERPRNPAGCLCFPMCYTYHCDVGLHHVHDPAECHSAKGHGGGG

SEQ ID NO: 26451 - protein, 116 aa, Artificial Sequence
  Synthetic polypeptide
TDAVARACNCSTLRGRGIQPAVFAFPCATLITVMLAFIMYMTLRNATQQKDMVEVADFDFSPMSDKNPEPPSGVRCCCQMCCGPFLLETPSEYLEIVRENHGLLPPLYKSVKTYTV

SEQ ID NO: 26452 - protein, 70 aa, Artificial Sequence
  Synthetic polypeptide
LQHFERPRNPAGCLCFPMCYTYHCDVGLHHVHDPAECHSAKGHGGEPGATLWGQVLLPDVLWAFLAGDSI

SEQ ID NO: 26453 - protein, 70 aa, Artificial Sequence; identical to SEQ ID NO: 26452
  Synthetic polypeptide

SEQ ID NO: 26454 - protein, 70 aa, Artificial Sequence; identical to SEQ ID NO: 26452
  Synthetic polypeptide

SEQ ID NO: 26455 - protein, 70 aa, Artificial Sequence; identical to SEQ ID NO: 26452
  Synthetic polypeptide

SEQ ID NO: 26456 - protein, 104 aa, Artificial Sequence
  Synthetic polypeptide
TDAVARACNCSTLRGRGIQPAVFAFPCATLITVMLAFIMYMTLRNATQQKDMVENPEPPSGVRCCCQMCCGPFLLETPSEYLEIVRENHGLLPPLYKSVKTYTV

SEQ ID NO: 26457 - protein, 104 aa, Artificial Sequence; identical to SEQ ID NO: 26456
  Synthetic polypeptide

SEQ ID NO: 26458 - protein, 104 aa, Artificial Sequence; identical to SEQ ID NO: 26456
  Synthetic polypeptide

SEQ ID NO: 26459 - protein, 104 aa, Artificial Sequence; identical to SEQ ID NO: 26456
  Synthetic polypeptide

SEQ ID NO: 26460 - protein, 51 aa, Artificial Sequence
  Synthetic polypeptide
TNRCFCLSLGFLLYKLKEPSRHGLPQLPGGAHQLPRLEQGPHPDCHLPQQP

SEQ ID NO: 26461 - protein, 70 aa, Artificial Sequence
  Synthetic polypeptide
DLGSESQAASFSRSRVTLNKSLLLSEPGFPPVQTEGAKPPWPTTASWWSPSAATPGTRTAPRLPSAPTTM

SEQ ID NO: 26462 - protein, 762 aa, Artificial Sequence
  Synthetic polypeptide
GSIDLACERHLERCVAHIPVKDKKLLEVKLGELPSWILMRDFSPSGIFGAFQRGPGGTGKPEMDFVRLARLFARARPMGLFILQHLDPCRARWAGGREGLMRPMWAPFSSSSSQLPLGQERQENTGSLGSDPSHSNSTATQEEDEEEEESFGTLSDKYSSRRLFRKSAAQFHNLRFGERRDEQMEPEPKLWRGRRNTPYWYFLQCKHLIKEGKLVEALDLFERQMLKEERLQPMESNYTVLIGGCGRVGYLKKAFNLYNQMKKRDLEPSDATYTALFNVCAESPWKDSALQSALKLRQQLQAKNFELNLKTYHALLKMAAKCADLRMCLDVFKEIIHKGHVVTEETFSFLLMGCIQDKKTGFRYALQVWRLMLSLGLQPSRDSYNLLLVAARDCGLGDPQVASELLLKPREEATVLQPPVSRQRPRRTAQAKAGNLMSAMLHVEALERQLFLEPSQALGPPEPPEARVPGKAQPEVDTKAEPSHTAALTAVALKPPPVELEVNLLTPGAVPPTVVSFGTVTTPADRLALIGGLEGFLSKMAEHRQQPDIRTLTLLAEVVESGSPAESLLLALLDEHQVEADLTFFNTLVRKKSKLGDLEGAKALLPVLAKRGLVPNLQTFCNLAIGCHRPKDGLQLLTDMKKSQVTPNTHIYSALINAAIRKLNYTYLISILKDMKQNRVPVNEVVIRQLEFAAQYPPTFDRYQGKNTYLEKIDGFRAYYKQWLTVMPAEETPHPWQKFRTKPQGDQDTGKEADDGCALGGR

SEQ ID NO: 26463 - protein, 762 aa, Artificial Sequence; identical to SEQ ID NO: 26462
  Synthetic polypeptide

SEQ ID NO: 26464 - protein, 14 aa, Artificial Sequence
  Synthetic polypeptide
HVKDTWNAAWPTYQ

SEQ ID NO: 26465 - protein, 14 aa, Artificial Sequence
  Synthetic polypeptide
HVKDTWNAAWPTYQ

SEQ ID NO: 26466 - protein, 14 aa, Artificial Sequence
  Synthetic polypeptide
HVKDTWNAAWPTYQ

SEQ ID NO: 26467 - protein, 14 aa, Artificial Sequence
  Synthetic polypeptide
HVKDTWNAAWPTYQ

SEQ ID NO: 26468 - protein, 14 aa, Artificial Sequence
  Synthetic polypeptide
HVKDTWNAAWPTYQ

SEQ ID NO: 26469 - protein, 14 aa, Artificial Sequence
  Synthetic polypeptide
HVKDTWNAAWPTYQ

SEQ ID NO: 26470 - protein, 14 aa, Artificial Sequence
  Synthetic polypeptide
HVKDTWNAAWPTYQ

SEQ ID NO: 26471 - protein, 14 aa, Artificial Sequence
  Synthetic polypeptide
HVKDTWNAAWPTYQ

SEQ ID NO: 26472 - protein, 14 aa, Artificial Sequence
  Synthetic polypeptide
HVKDTWNAAWPTYQ

SEQ ID NO: 26473 - protein, 14 aa, Artificial Sequence
  Synthetic polypeptide
HVKDTWNAAWPTYQ

SEQ ID NO: 26474 - protein, 36 aa, Artificial Sequence
  Synthetic polypeptide
KTLGTLRGPHTSEGQETSGGQTGGAAKLDLDAGLQS

SEQ ID NO: 26475 - protein, 36 aa, Artificial Sequence; identical to SEQ ID NO: 26474
  Synthetic polypeptide

SEQ ID NO: 26476 - protein, 36 aa, Artificial Sequence; identical to SEQ ID NO: 26474
  Synthetic polypeptide

SEQ ID NO: 26477 - protein, 36 aa, Artificial Sequence; identical to SEQ ID NO: 26474
  Synthetic polypeptide

SEQ ID NO: 26478 - protein, 36 aa, Artificial Sequence; identical to SEQ ID NO: 26474
  Synthetic polypeptide

SEQ ID NO: 26479 - protein, 36 aa, Artificial Sequence; identical to SEQ ID NO: 26474
  Synthetic polypeptide

SEQ ID NO: 26480 - protein, 36 aa, Artificial Sequence; identical to SEQ ID NO: 26474
  Synthetic polypeptide

SEQ ID NO: 26481 - protein, 36 aa, Artificial Sequence; identical to SEQ ID NO: 26474
  Synthetic polypeptide

SEQ ID NO: 26482 - protein, 36 aa, Artificial Sequence; identical to SEQ ID NO: 26474
  Synthetic polypeptide

SEQ ID NO: 26483 - protein, 36 aa, Artificial Sequence; identical to SEQ ID NO: 26474
  Synthetic polypeptide

SEQ ID NO: 26484 - protein, 67 aa, Artificial Sequence
  Synthetic polypeptide
GSIDLACERHLERCVAHIPVKDKKLLEVKLGELPSWILMRDFSPSGIFGAFQRGYGQAASVEGAYRL

SEQ ID NO: 26485 - protein, 62 aa, Artificial Sequence
  Synthetic polypeptide
GSIDLACERHLERCVAHIPVKDKKLLEVKLGELPSWILMRDFSPSGIFGAFQREHERLRKYH

SEQ ID NO: 26486 - protein, 62 aa, Artificial Sequence; identical to SEQ ID NO: 26485
  Synthetic polypeptide

SEQ ID NO: 26487 - protein, 62 aa, Artificial Sequence; identical to SEQ ID NO: 26485
  Synthetic polypeptide

SEQ ID NO: 26488 - protein, 101 aa, Artificial Sequence
  Synthetic polypeptide
GSIDLACERHLERCVAHIPVKDKKLLEVKLGELPSWILMRDFSPSGIFGAFQRGYYRYYNKYINVKKGSISGITMVLACYVLFSYSFSYKHLKHERLRKYH

SEQ ID NO: 26489 - protein, 101 aa, Artificial Sequence; identical to SEQ ID NO: 26488
  Synthetic polypeptide

SEQ ID NO: 26490 - protein, 101 aa, Artificial Sequence; identical to SEQ ID NO: 26488
  Synthetic polypeptide

SEQ ID NO: 26491 - protein, 101 aa, Artificial Sequence; identical to SEQ ID NO: 26488
  Synthetic polypeptide

SEQ ID NO: 26492 - protein, 178 aa, Artificial Sequence
  Synthetic polypeptide
SWKPSFSANYGKDKKPNTAPPTYDAVVQMEYLDMVVNETLRLFPVAIRLERTCKKDVEINGVFIPKGSMVVIPTYALHHDPKYWTEPEEFRPERFSKKKDSIDPYIYTPFGTGPRNCIGMRFALMNMKLALIRVLQNFSFKPCKETQIPLKLDTQGLLQPEKPIVLKVDSRDGTLSGE

SEQ ID NO: 26493 - protein, 178 aa, Artificial Sequence; identical to SEQ ID NO: 26492
  Synthetic polypeptide

SEQ ID NO: 26494 - protein, 45 aa, Artificial Sequence
  Synthetic polypeptide
VHVLCRDMDEAGNHHSQQTMARTKNQTLHHLPMMPWYRWSTLTWW

SEQ ID NO: 26495 - protein, 45 aa, Artificial Sequence; identical to SEQ ID NO: 26494
  Synthetic polypeptide

SEQ ID NO: 26496 - protein, 112 aa, Artificial Sequence
  Synthetic polypeptide
FLRDLELEIPFDPAIPLLGIYPKDYKSSCYKHTCTLMFIAALFTIAKTWNQPKCPIMIDWIKKMWHIYTMECYAAIKNDEFMSFVETWMKLETIILSKLWQGQKTKHCTTYL

SEQ ID NO: 26497 - protein, 112 aa, Artificial Sequence; identical to SEQ ID NO: 26496
  Synthetic polypeptide

SEQ ID NO: 26498 - protein, 91 aa, Artificial Sequence
  Synthetic polypeptide
FLHFQLRFSKKKDSIDPYIYTPFGTGPRNCIGMRFALMNMKLALIRVLQNFSFKPCKETQIPLKLDTQGLLQPEKPIVLKVDSRDGTLSGE

SEQ ID NO: 26499 - protein, 91 aa, Artificial Sequence; identical to SEQ ID NO: 26498
  Synthetic polypeptide

SEQ ID NO: 26500 - protein, 30 aa, Artificial Sequence
  Synthetic polypeptide
DGQTGTAPVYSSQREQHRRRMISAFPTEVQ

SEQ ID NO: 26501 - protein, 30 aa, Artificial Sequence; identical to SEQ ID NO: 26500
  Synthetic polypeptide

SEQ ID NO: 26502 - protein, 24 aa, Artificial Sequence
  Synthetic polypeptide
FLHFQLRHHLPMMPWYRWSTLTWW

SEQ ID NO: 26503 - protein, 24 aa, Artificial Sequence
  Synthetic polypeptide
FLHFQLRHHLPMMPWYRWSTLTWW

SEQ ID NO: 26504 - protein, 174 aa, Artificial Sequence
  Synthetic polypeptide
DRQRRQVISAFPTEAPPTYDAVVQMEYLDMVVNETLRLFPVAIRLERTCKKDVEINGVFIPKGSMVVIPTYALHHDPKYWTEPEEFRPERFSKKKDSIDPYIYTPFGTGPRNCIGMRFALMNMKLALIRVLQNFSFKPCKETQIPLKLDTQGLLQPEKPIVLKVDSRDGTLSGE

SEQ ID NO: 26505 - protein, 174 aa, Artificial Sequence; identical to SEQ ID NO: 26504
  Synthetic polypeptide

SEQ ID NO: 26506 - protein, 41 aa, Artificial Sequence
  Synthetic polypeptide
EQLQSTAPSVSDAEDESFLHFQLRHHLPMMPWYRWSTLTWW

SEQ ID NO: 26507 - protein, 41 aa, Artificial Sequence; identical to SEQ ID NO: 26506
  Synthetic polypeptide

SEQ ID NO: 26508 - protein, 172 aa, Artificial Sequence
  Synthetic polypeptide
RRRRIISAFPTEAPPTYDAVVQMEYLDMVVNETLRLFPVAIRLERTCKKDVEINGVFIPKGSMVVIPTYALHHDPKYWTEPEEFRPERFSKKKDSIDPYIYTPFGTGPRNCIGMRFALMNMKLALIRVLQNFSFKPCKETQIPLKLDTQGLLQPEKPIVLKVDSRDGTLSGE

SEQ ID NO: 26509 - protein, 172 aa, Artificial Sequence; identical to SEQ ID NO: 26508
  Synthetic polypeptide

SEQ ID NO: 26510 - protein, 8 aa, Artificial Sequence
  Synthetic polypeptide
LVIWGPGE

SEQ ID NO: 26511 - protein, 8 aa, Artificial Sequence
  Synthetic polypeptide
LVIWGPGE

SEQ ID NO: 26512 - protein, 195 aa, Artificial Sequence
  Synthetic polypeptide
GQAWWLMPVIRVFWMLRYFRSCLLTASFFPLSETQRLWLALPSPTINPPHQPSASHHLWLPSWPILEASTGLGPVGTTTLATYYGLTLACPFPQRRGPREGIFIPPETPTPHSCRSCLLVLALEPKPSIPMPSSILFPLLLIIAARYQALPLSIWGLHPSSSGVWHGWTLSLTWSWWLSTSMSHWFCWQMPCAGV

SEQ ID NO: 26513 - protein, 195 aa, Artificial Sequence; identical to SEQ ID NO: 26512
  Synthetic polypeptide

SEQ ID NO: 26514 - protein, 195 aa, Artificial Sequence; identical to SEQ ID NO: 26512
  Synthetic polypeptide

SEQ ID NO: 26515 - protein, 195 aa, Artificial Sequence; identical to SEQ ID NO: 26512
  Synthetic polypeptide

SEQ ID NO: 26516 - protein, 195 aa, Artificial Sequence; identical to SEQ ID NO: 26512
  Synthetic polypeptide

SEQ ID NO: 26517 - protein, 359 aa, Artificial Sequence
  Synthetic polypeptide
PGMVAHACDPSVLDAEVLQVMPSDSFFFSIVRDPAALARSAFSYYKSTSSAFRKSPSLAAFLANPRGFYRPGARGDHYARNLLWFDFGLPFPPEKRAKRGNIHPPRDPNPPQLQVLPSGAGPRAQTLNPNALIHPVSTVTDHRSQISSPASFDLGSSSFIQWGLAWLDSVFDLVMVAEYFDESLVLLADALCWGLDDVVGFMHNAQAGHKQGLSTVSNSGLTAEDRQLTARARAWNNLDWALYVHFNRSLWARIEKYGQGRLQTAVAELRARREALAKHCLVGGEASDPKYITDRRFRPFQFGSAKVLGYILRSGLSPQDQEECERLATPELQYKDKLDAKQFPPTVSLPLKTSRPLSP

SEQ ID NO: 26518 - protein, 359 aa, Artificial Sequence; identical to SEQ ID NO: 26517
  Synthetic polypeptide

SEQ ID NO: 26519 - protein, 359 aa, Artificial Sequence; identical to SEQ ID NO: 26517
  Synthetic polypeptide

SEQ ID NO: 26520 - protein, 195 aa, Artificial Sequence
  Synthetic polypeptide
PGMVAHACDPSVLDAEVLQVMPSDSFFFSIVRDPAALARSAFSYYKSTSSAFRKSPSLAAFLANPRGFYRPGARGDHYARNLLWFDFGLPFPPEKRAKRGNIHPPRDPNPPQLQVLPSGAGPRAQTLNPNALIHPVSTVTDHRSQISSPASFDLGSSSFIQWGLAWLDSVFDLVMVAEYFDESLVLLADALCWGL

SEQ ID NO: 26521 - protein, 195 aa, Artificial Sequence; identical to SEQ ID NO: 26520
  Synthetic polypeptide

SEQ ID NO: 26522 - protein, 26 aa, Artificial Sequence
  Synthetic polypeptide
DHLGQHGETPVIPATREAEEWRLFVS

SEQ ID NO: 26523 - protein, 26 aa, Artificial Sequence
  Synthetic polypeptide
DHLGQHGETPVIPATREAEEWRLFVS

SEQ ID NO: 26524 - protein, 26 aa, Artificial Sequence
  Synthetic polypeptide
DHLGQHGETPVIPATREAEEWRLFVS

SEQ ID NO: 26525 - protein, 26 aa, Artificial Sequence
  Synthetic polypeptide
DHLGQHGETPVIPATREAEEWRLFVS

SEQ ID NO: 26526 - protein, 26 aa, Artificial Sequence
  Synthetic polypeptide
DHLGQHGETPVIPATREAEEWRLFVS

SEQ ID NO: 26527 - protein, 26 aa, Artificial Sequence
  Synthetic polypeptide
DHLGQHGETPVIPATREAEEWRLFVS

SEQ ID NO: 26528 - protein, 1194 aa, Artificial Sequence
  Synthetic polypeptide
SQLLGRLRNGDSLLADEDTDFEDSLNRNVKKRAAKRPPKTTPVAKHPKKGSRVVHRHSRKQSEPPANDLFNAVKAAKSDMQSLVDEWLDSYKQDQDAGFLELVNFFIQSCGCKGIVTPEMFKKMSNSEIIQHLTEQFNEDSGDYPLIAPGPSWKKFQGSFCEFVRTLVCQCQYSLLYDGFPMDDLISLLTGLSDSQVRAFRHTSTLAAMKLMTSLVKVALQLSVHQDNNQRQYEAERNKGPGQRAPERLESLLEKRKELQEHQEEIEGMMNALFRGVFVHRYRDVLPEIRAICIEEIGCWMQSYSTSFLTDSYLKYIGWTLHDKHREVRLKCVKALKGLYGNRDLTTRLELFTSRFKDRMVSMVMDREYDVAVEAVRLLILILKNMEGVLTDADCESVYPVVYASHRGLASAAGEFLYWKLFYPECEIRMMGGREQRQSPGAQRTFFQLLLSFFVESELHDHAAYLVDSLWDCAGARLKDWEGLTSLLLEKDQNLGDVQESTLIEILVSSARQASEGHPPVGRVTGRKGLTSKERKTQADDRVKLTEHLIPLLPQLLAKFSADAEKVTPLLQLLSCFDLHIYCTGRLEKHLELFLQQLQEVVVKHAEPAVLEAGAHALYLLCNPEFTFFSRADFARSQLVDLLTDRFQQELEELLQSSFLDEDEVYNLAATLKRLSAFYNTHDLTRWELYEPCCQLLQKAVDTGEVPHQVILPALTLVYFSILWTLTHISKSDASQKQLSSLRDRMVAFCELCQSCLSDVDTEIQEQAFVLLSDLLLIFSPQMIVGGRDFLRPLVFFPEATLQSELASFLMDHVFIQPGDLGSGDSQEDHLQIERLHQRRRLLAGFCKLLLYGVLEMDAASDVFKHYNKFYNDYGDIIKETLTRARQIDRSHCSRILLLSLKQLYTELLQEHGPQGLNELPAFIEMRDLARRFALSFGPQQLQNRDLVVMLHKEGIQFSLSELPPAGSSNQPPNLAFLELLSEFSPRLFHQDKQLLLSYLEKCLQHVSQAPGHPWGPVTTYCHSLSPVENTAETSPQVLPSSKRRRVEGPAKPNREDVSSSQEESLQLNSIPPTPTLTSTAVKSRQPLWGLKEMEEEDGSELDFAQGQPVAGTERSRFLGPQYFQTPHNPSGPGLGNQLMRLSLMEEDEEEELEIQDESNEERQDTDMQASSYSSTSERGLDLLDSTELDIEDF

SEQ ID NO: 26529 - protein, 1194 aa, Artificial Sequence; identical to SEQ ID NO: 26528
  Synthetic polypeptide

SEQ ID NO: 26530 - protein, 1136 aa, Artificial Sequence
  Synthetic polypeptide
SQLLGRLRNGDSLLADEDTDFEDSLNRNVKKRAAKRPPKTTPVAKHPKKGSRVVHRHSRKQSEPPANDLFNAVKAAKSDMQDSGDYPLIAPGPSWKKFQGSFCEFVRTLVCQCQYSLLYDGFPMDDLISLLTGLSDSQVRAFRHTSTLAAMKLMTSLVKVALQLSVHQDNNQRQYEAERNKGPGQRAPERLESLLEKRKELQEHQEEIEGMMNALFRGVFVHRYRDVLPEIRAICIEEIGCWMQSYSTSFLTDSYLKYIGWTLHDKHREVRLKCVKALKGLYGNRDLTTRLELFTSRFKDRMVSMVMDREYDVAVEAVRLLILILKNMEGVLTDADCESVYPVVYASHRGLASAAGEFLYWKLFYPECEIRMMGGREQRQSPGAQRTFFQLLLSFFVESELHDHAAYLVDSLWDCAGARLKDWEGLTSLLLEKDQNLGDVQESTLIEILVSSARQASEGHPPVGRVTGRKGLTSKERKTQADDRVKLTEHLIPLLPQLLAKFSADAEKVTPLLQLLSCFDLHIYCTGRLEKHLELFLQQLQEVVVKHAEPAVLEAGAHALYLLCNPEFTFFSRADFARSQLVDLLTDRFQQELEELLQSSFLDEDEVYNLAATLKRLSAFYNTHDLTRWELYEPCCQLLQKAVDTGEVPHQVILPALTLVYFSILWTLTHISKSDASQKQLSSLRDRMVAFCELCQSCLSDVDTEIQEQAFVLLSDLLLIFSPQMIVGGRDFLRPLVFFPEATLQSELASFLMDHVFIQPGDLGSGDSQEDHLQIERLHQRRRLLAGFCKLLLYGVLEMDAASDVFKHYNKFYNDYGDIIKETLTRARQIDRSHCSRILLLSLKQLYTELLQEHGPQGLNELPAFIEMRDLARRFALSFGPQQLQNRDLVVMLHKEGIQFSLSELPPAGSSNQPPNLAFLELLSEFSPRLFHQDKQLLLSYLEKCLQHVSQAPGHPWGPVTTYCHSLSPVENTAETSPQVLPSSKRRRVEGPAKPNREDVSSSQEESLQLNSIPPTPTLTSTAVKSRQPLWGLKEMEEEDGSELDFAQGQPVAGTERSRFLGPQYFQTPHNPSGPGLGNQLMRLSLMEEDEEEELEIQDESNEERQDTDMQASSYSSTSERGLDLLDSTELDIEDF

SEQ ID NO: 26531 - protein, 113 aa, Artificial Sequence
  Synthetic polypeptide
SQLLGRLRNGDSLLADEDTDFEDSLNRNVKKRAAKRPPKTTPVAKHPKKGSRVVHRHSRKQSEPPANDLFNAVKAAKSDMQSLVDEWLDSYKQDQDAGFLELVNFFIQSCGCK

SEQ ID NO: 26532 - protein, 81 aa, Artificial Sequence
  Synthetic polypeptide
SQLLGRLRNGDSLLADEDTDFEDSLNRNVKKRAAKRPPKTTPVAKHPKKGSRVVHRHSRKQSEPPANDLFNAVKAAKSDMQ

SEQ ID NO: 26533 - protein, 157 aa, Artificial Sequence
  Synthetic polypeptide
SQLLGRLRNGDSLLADEDTDFEDSLNRNVKKRAAKRPPKTTPVAKHPKKGSRVVHRHSRKQSEPPANDLFNAVKAAKSDMQDSGDYPLIAPGPSWKKFQGSFCEFVRTLVCQCQYSLLYDGFPMDDLISLLTGLSDSQVRAFRHTSTLAAMKLMTSL

SEQ ID NO: 26534 - protein, 22 aa, Artificial Sequence
  Synthetic polypeptide
SVYPQPLRICTQNCCRSMGPRA

SEQ ID NO: 26535 - protein, 22 aa, Artificial Sequence
  Synthetic polypeptide
SVYPQPLRICTQNCCRSMGPRA

SEQ ID NO: 26536 - protein, 22 aa, Artificial Sequence
  Synthetic polypeptide
SVYPQPLRICTQNCCRSMGPRA

SEQ ID NO: 26537 - protein, 23 aa, Artificial Sequence
  Synthetic polypeptide
MSTLSHSESVHRTAAGAWAPGPE

SEQ ID NO: 26538 - protein, 23 aa, Artificial Sequence
  Synthetic polypeptide
MSTLSHSESVHRTAAGAWAPGPE

SEQ ID NO: 26539 - protein, 23 aa, Artificial Sequence
  Synthetic polypeptide
MSTLSHSESVHRTAAGAWAPGPE

SEQ ID NO: 26540 - protein, 299 aa, Artificial Sequence
  Synthetic polypeptide
CLPSATQNLYTELLQEHGPQGLNELPAFIEMRDLARRFALSFGPQQLQNRDLVVMLHKEGIQFSLSELPPAGSSNQPPNLAFLELLSEFSPRLFHQDKQLLLSYLEKCLQHVSQAPGHPWGPVTTYCHSLSPVENTAETSPQVLPSSKRRRVEGPAKPNREDVSSSQEESLQLNSIPPTPTLTSTAVKSRQPLWGLKEMEEEDGSELDFAQGQPVAGTERSRFLGPQYFQTPHNPSGPGLGNQLMRLSLMEEDEEEELEIQDESNEERQDTDMQASSYSSTSERGLDLLDSTELDIEDF

SEQ ID NO: 26541 - protein, 299 aa, Artificial Sequence; identical to SEQ ID NO: 26540
  Synthetic polypeptide

SEQ ID NO: 26542 - protein, 299 aa, Artificial Sequence; identical to SEQ ID NO: 26540
  Synthetic polypeptide

SEQ ID NO: 26543 - protein, 75 aa, Artificial Sequence
  Synthetic polypeptide
GCSPHGWMNALLSPGQRASLLFLLQVRIQLEASSLQAGRRPSPEPNPWTSASRTVSTSGSVPRSTPAVPVRQSRG

SEQ ID NO: 26544 - protein, 24 aa, Artificial Sequence
  Synthetic polypeptide
KPAVYRLEEGPHQNPTLGLQPPEL

SEQ ID NO: 26545 - protein, 559 aa, Artificial Sequence
  Synthetic polypeptide
LAVSPPGEDTTRSQQSTGWKKALTRTQPLDFSLQNCEHLRVCPQEYTCCSSETEQRLIRETEATFRGLVEDSGSFLVHTLAARHRKFDEFFLEMLSVAQHSLTQLFSHSYGRLYAQHALIFNGLFSRLRDFYGESGEGLDDTLADFWAQLLERVFPLLHPQYSFPPDYLLCLSRLASSTDGSLQPFGDSPRRLRLQITRTLVAARAFVQGLETGRNVVSEALKVPVSEGCSQALMRLIGCPLCRGVPSLMPCQGFCLNVVRGCLSSRGLEPDWGNYLDGLLILADKLQGPFSFELTAESIGVKISEGLMYLQENSAKVSAQVFQECGPPDPVPARNRRAPPPREEAGRLWSMVTEEERPTTAAGTNLHRLVWELRERLARMRGFWARLSLTVCGDSRMAADASLEAAPCWTGAGRGRYLPPVVGGSPAEQVNNPELKVDASGPDVPTRRRRLQLRAATARMKTAALGHDLDGQDADEDASGSGGGQQYADDWMAGAVAPPARPPRPPYPPRRDGSGGKGGGGSARYNQGRSRSGGASIGFHTQTILILSLSALALLGPR

SEQ ID NO: 26546 - protein, 39 aa, Artificial Sequence
  Synthetic polypeptide
GQFRVADQRKKAYADFYRNYDVMKDFEEMRKAGIFQSVK

SEQ ID NO: 26547 - protein, 39 aa, Artificial Sequence; identical to SEQ ID NO: 26546
  Synthetic polypeptide

SEQ ID NO: 26548 - protein, 39 aa, Artificial Sequence; identical to SEQ ID NO: 26546
  Synthetic polypeptide

SEQ ID NO: 26549 - protein, 39 aa, Artificial Sequence; identical to SEQ ID NO: 26546
  Synthetic polypeptide

SEQ ID NO: 26550 - protein, 39 aa, Artificial Sequence; identical to SEQ ID NO: 26546
  Synthetic polypeptide

SEQ ID NO: 26551 - protein, 39 aa, Artificial Sequence; identical to SEQ ID NO: 26546
  Synthetic polypeptide

SEQ ID NO: 26552 - protein, 39 aa, Artificial Sequence; identical to SEQ ID NO: 26546
  Synthetic polypeptide

SEQ ID NO: 26553 - protein, 39 aa, Artificial Sequence; identical to SEQ ID NO: 26546
  Synthetic polypeptide

SEQ ID NO: 26554 - protein, 39 aa, Artificial Sequence; identical to SEQ ID NO: 26546
  Synthetic polypeptide

SEQ ID NO: 26555 - protein, 39 aa, Artificial Sequence; identical to SEQ ID NO: 26546
  Synthetic polypeptide

SEQ ID NO: 26556 - protein, 22 aa, Artificial Sequence
  Synthetic polypeptide
ASFVWLIKERRHTQISTETTMS

SEQ ID NO: 26557 - protein, 22 aa, Artificial Sequence
  Synthetic polypeptide
ASFVWLIKERRHTQISTETTMS

SEQ ID NO: 26558 - protein, 22 aa, Artificial Sequence
  Synthetic polypeptide
ASFVWLIKERRHTQISTETTMS

SEQ ID NO: 26559 - protein, 22 aa, Artificial Sequence
  Synthetic polypeptide
ASFVWLIKERRHTQISTETTMS

SEQ ID NO: 26560 - protein, 22 aa, Artificial Sequence
  Synthetic polypeptide
ASFVWLIKERRHTQISTETTMS

SEQ ID NO: 26561 - protein, 22 aa, Artificial Sequence
  Synthetic polypeptide
ASFVWLIKERRHTQISTETTMS

SEQ ID NO: 26562 - protein, 22 aa, Artificial Sequence
  Synthetic polypeptide
ASFVWLIKERRHTQISTETTMS

SEQ ID NO: 26563 - protein, 22 aa, Artificial Sequence
  Synthetic polypeptide
ASFVWLIKERRHTQISTETTMS

SEQ ID NO: 26564 - protein, 22 aa, Artificial Sequence
  Synthetic polypeptide
ASFVWLIKERRHTQISTETTMS

SEQ ID NO: 26565 - protein, 22 aa, Artificial Sequence
  Synthetic polypeptide
ASFVWLIKERRHTQISTETTMS

SEQ ID NO: 26566 - protein, 5 aa, Artificial Sequence
  Synthetic polypeptide
PVSCG

SEQ ID NO: 26567 - protein, 5 aa, Artificial Sequence
  Synthetic polypeptide
PVSCG

SEQ ID NO: 26568 - protein, 5 aa, Artificial Sequence
  Synthetic polypeptide
PVSCG

SEQ ID NO: 26569 - protein, 5 aa, Artificial Sequence
  Synthetic polypeptide
PVSCG

SEQ ID NO: 26570 - protein, 5 aa, Artificial Sequence
  Synthetic polypeptide
PVSCG

SEQ ID NO: 26571 - protein, 5 aa, Artificial Sequence
  Synthetic polypeptide
PVSCG

SEQ ID NO: 26572 - protein, 5 aa, Artificial Sequence
  Synthetic polypeptide
PVSCG

SEQ ID NO: 26573 - protein, 5 aa, Artificial Sequence
  Synthetic polypeptide
PVSCG

SEQ ID NO: 26574 - protein, 5 aa, Artificial Sequence
  Synthetic polypeptide
PVSCG

SEQ ID NO: 26575 - protein, 5 aa, Artificial Sequence
  Synthetic polypeptide
PVSCG

SEQ ID NO: 26576 - protein, 26 aa, Artificial Sequence
  Synthetic polypeptide
LLRKLSFVWLIKERRHTQISTETTMS

SEQ ID NO: 26577 - protein, 26 aa, Artificial Sequence
  Synthetic polypeptide
LLRKLSFVWLIKERRHTQISTETTMS

SEQ ID NO: 26578 - protein, 26 aa, Artificial Sequence
  Synthetic polypeptide
LLRKLSFVWLIKERRHTQISTETTMS

SEQ ID NO: 26579 - protein, 26 aa, Artificial Sequence
  Synthetic polypeptide
LLRKLSFVWLIKERRHTQISTETTMS

SEQ ID NO: 26580 - protein, 26 aa, Artificial Sequence
  Synthetic polypeptide
LLRKLSFVWLIKERRHTQISTETTMS

SEQ ID NO: 26581 - protein, 26 aa, Artificial Sequence
  Synthetic polypeptide
LLRKLSFVWLIKERRHTQISTETTMS

SEQ ID NO: 26582 - protein, 26 aa, Artificial Sequence
  Synthetic polypeptide
LLRKLSFVWLIKERRHTQISTETTMS

SEQ ID NO: 26583 - protein, 26 aa, Artificial Sequence
  Synthetic polypeptide
LLRKLSFVWLIKERRHTQISTETTMS

SEQ ID NO: 26584 - protein, 26 aa, Artificial Sequence
  Synthetic polypeptide
LLRKLSFVWLIKERRHTQISTETTMS

SEQ ID NO: 26585 - protein, 26 aa, Artificial Sequence
  Synthetic polypeptide
LLRKLSFVWLIKERRHTQISTETTMS

SEQ ID NO: 26586 - protein, 58 aa, Artificial Sequence
  Synthetic polypeptide
ISSKNTKIHDVPVALATQEVEFRVADQRKKAYADFYRNYDVMKDFEEMRKAGIFQSVK

SEQ ID NO: 26587 - protein, 58 aa, Artificial Sequence; identical to SEQ ID NO: 26586
  Synthetic polypeptide

SEQ ID NO: 26588 - protein, 58 aa, Artificial Sequence; identical to SEQ ID NO: 26586
  Synthetic polypeptide

SEQ ID NO: 26589 - protein, 58 aa, Artificial Sequence; identical to SEQ ID NO: 26586
  Synthetic polypeptide

SEQ ID NO: 26590 - protein, 58 aa, Artificial Sequence; identical to SEQ ID NO: 26586
  Synthetic polypeptide

SEQ ID NO: 26591 - protein, 58 aa, Artificial Sequence; identical to SEQ ID NO: 26586
  Synthetic polypeptide

SEQ ID NO: 26592 - protein, 58 aa, Artificial Sequence; identical to SEQ ID NO: 26586
  Synthetic polypeptide

SEQ ID NO: 26593 - protein, 58 aa, Artificial Sequence; identical to SEQ ID NO: 26586
  Synthetic polypeptide

SEQ ID NO: 26594 - protein, 58 aa, Artificial Sequence; identical to SEQ ID NO: 26586
  Synthetic polypeptide

SEQ ID NO: 26595 - protein, 58 aa, Artificial Sequence; identical to SEQ ID NO: 26586
  Synthetic polypeptide

SEQ ID NO: 26596 - protein, 22 aa, Artificial Sequence
  Synthetic polypeptide
PCFVWLIKERRHTQISTETTMS

SEQ ID NO: 26597 - protein, 22 aa, Artificial Sequence
  Synthetic polypeptide
PCFVWLIKERRHTQISTETTMS

SEQ ID NO: 26598 - protein, 22 aa, Artificial Sequence
  Synthetic polypeptide
PCFVWLIKERRHTQISTETTMS

SEQ ID NO: 26599 - protein, 22 aa, Artificial Sequence
  Synthetic polypeptide
PCFVWLIKERRHTQISTETTMS

SEQ ID NO: 26600 - protein, 22 aa, Artificial Sequence
  Synthetic polypeptide
PCFVWLIKERRHTQISTETTMS

SEQ ID NO: 26601 - protein, 22 aa, Artificial Sequence
  Synthetic polypeptide
PCFVWLIKERRHTQISTETTMS

SEQ ID NO: 26602 - protein, 22 aa, Artificial Sequence
  Synthetic polypeptide
PCFVWLIKERRHTQISTETTMS

SEQ ID NO: 26603 - protein, 22 aa, Artificial Sequence
  Synthetic polypeptide
PCFVWLIKERRHTQISTETTMS

SEQ ID NO: 26604 - protein, 22 aa, Artificial Sequence
  Synthetic polypeptide
PCFVWLIKERRHTQISTETTMS

SEQ ID NO: 26605 - protein, 22 aa, Artificial Sequence
  Synthetic polypeptide
PCFVWLIKERRHTQISTETTMS

SEQ ID NO: 26606 - protein, 21 aa, Artificial Sequence
  Synthetic polypeptide
AGPGLVPAALFHSHCDLVSCG

SEQ ID NO: 26607 - protein, 21 aa, Artificial Sequence
  Synthetic polypeptide
AGPGLVPAALFHSHCDLVSCG

SEQ ID NO: 26608 - protein, 21 aa, Artificial Sequence
  Synthetic polypeptide
AGPGLVPAALFHSHCDLVSCG

SEQ ID NO: 26609 - protein, 21 aa, Artificial Sequence
  Synthetic polypeptide
AGPGLVPAALFHSHCDLVSCG

SEQ ID NO: 26610 - protein, 21 aa, Artificial Sequence
  Synthetic polypeptide
AGPGLVPAALFHSHCDLVSCG

SEQ ID NO: 26611 - protein, 21 aa, Artificial Sequence
  Synthetic polypeptide
AGPGLVPAALFHSHCDLVSCG

SEQ ID NO: 26612 - protein, 21 aa, Artificial Sequence
  Synthetic polypeptide
AGPGLVPAALFHSHCDLVSCG

SEQ ID NO: 26613 - protein, 21 aa, Artificial Sequence
  Synthetic polypeptide
AGPGLVPAALFHSHCDLVSCG

SEQ ID NO: 26614 - protein, 21 aa, Artificial Sequence
  Synthetic polypeptide
AGPGLVPAALFHSHCDLVSCG

SEQ ID NO: 26615 - protein, 21 aa, Artificial Sequence
  Synthetic polypeptide
AGPGLVPAALFHSHCDLVSCG

SEQ ID NO: 26616 - protein, 71 aa, Artificial Sequence
  Synthetic polypeptide
KPGGLRDPREPSWLRSELARGWYPLRFFTAIVTLFRVADQRKKAYADFYRNYDVMKDFEEMRKAGIFQSVK

SEQ ID NO: 26617 - protein, 71 aa, Artificial Sequence; identical to SEQ ID NO: 26616
  Synthetic polypeptide

SEQ ID NO: 26618 - protein, 71 aa, Artificial Sequence; identical to SEQ ID NO: 26616
  Synthetic polypeptide

SEQ ID NO: 26619 - protein, 71 aa, Artificial Sequence; identical to SEQ ID NO: 26616
  Synthetic polypeptide

SEQ ID NO: 26620 - protein, 71 aa, Artificial Sequence; identical to SEQ ID NO: 26616
  Synthetic polypeptide

SEQ ID NO: 26621 - protein, 71 aa, Artificial Sequence; identical to SEQ ID NO: 26616
  Synthetic polypeptide

SEQ ID NO: 26622 - protein, 71 aa, Artificial Sequence; identical to SEQ ID NO: 26616
  Synthetic polypeptide

SEQ ID NO: 26623 - protein, 71 aa, Artificial Sequence; identical to SEQ ID NO: 26616
  Synthetic polypeptide

SEQ ID NO: 26624 - protein, 71 aa, Artificial Sequence; identical to SEQ ID NO: 26616
  Synthetic polypeptide

SEQ ID NO: 26625 - protein, 71 aa, Artificial Sequence; identical to SEQ ID NO: 26616
  Synthetic polypeptide

SEQ ID NO: 26626 - protein, 356 aa, Artificial Sequence
  Synthetic polypeptide
PVTMDPNVLRSDVFVEFLKLAQLNTFDIATKKAYLDIFLPNEQSIRIEIITSDTAERVLEVVSHKIGLCRELLGYFGLFLIRFGKEGKLSVVKKLADFELPYVSLGSSEVENCKVGLRKWYMAPSLDSVLMDCRVAVDLLYMQAIQDIEKGWAKPTQAQRQKLEAFQKEDSQTKFLELAREVRHYGYLQLDPCTCDYPESGSGAVLSVGNNEISCCITLPDSQTQDIVFQMSRVKCWQVTFLGTLLDTDGPQRTLNQNLELRFQYSEDSCWQWFVIYTKQAFLLSSCLKKMISEKMVKLAAENTEMQIEVPEQSKSKKYHIQQSQQKDYSSFLSRKSKIKIAKDDCVFGNIKEEDL

SEQ ID NO: 26627 - protein, 13 aa, Artificial Sequence
  Synthetic polypeptide
KLASNHGPKRVEK

SEQ ID NO: 26628 - protein, 13 aa, Artificial Sequence
  Synthetic polypeptide
KLASNHGPKRVEK

SEQ ID NO: 26629 - protein, 13 aa, Artificial Sequence
  Synthetic polypeptide
KLASNHGPKRVEK

SEQ ID NO: 26630 - protein, 106 aa, Artificial Sequence
  Synthetic polypeptide
PVTMDPNVLRSDVFVEFLKLAQLNTFDIATKKAYLDIFLPNEQSIRIEIITSDTAERVLEVVSHKIGLCRELLGYFGLFLIRFGKEGKLSVVKKLADFELPYVSLG

SEQ ID NO: 26631 - protein, 52 aa, Artificial Sequence
  Synthetic polypeptide
PVTMDPNVLRSDVFVEFLKLAQLNTFDIATKKAYLDIFLPNEQSIRIEIITS

SEQ ID NO: 26632 - protein, 20 aa, Artificial Sequence
  Synthetic polypeptide
QSETPSQKKIVDIGYPRRRS

SEQ ID NO: 26633 - protein, 20 aa, Artificial Sequence
  Synthetic polypeptide
QSETPSQKKIVDIGYPRRRS

SEQ ID NO: 26634 - protein, 20 aa, Artificial Sequence
  Synthetic polypeptide
QSETPSQKKIVDIGYPRRRS

SEQ ID NO: 26635 - protein, 20 aa, Artificial Sequence
  Synthetic polypeptide
QSETPSQKKIVDIGYPRRRS

SEQ ID NO: 26636 - protein, 20 aa, Artificial Sequence
  Synthetic polypeptide
QSETPSQKKIVDIGYPRRRS

SEQ ID NO: 26637 - protein, 20 aa, Artificial Sequence
  Synthetic polypeptide
QSETPSQKKIVDIGYPRRRS

SEQ ID NO: 26638 - protein, 20 aa, Artificial Sequence
  Synthetic polypeptide
QSETPSQKKIVDIGYPRRRS

SEQ ID NO: 26639 - protein, 20 aa, Artificial Sequence
  Synthetic polypeptide
QSETPSQKKIVDIGYPRRRS

SEQ ID NO: 26640 - protein, 20 aa, Artificial Sequence
  Synthetic polypeptide
QSETPSQKKIVDIGYPRRRS

SEQ ID NO: 26641 - protein, 20 aa, Artificial Sequence
  Synthetic polypeptide
QSETPSQKKIVDIGYPRRRS

SEQ ID NO: 26642 - protein, 20 aa, Artificial Sequence
  Synthetic polypeptide
QSETPSQKKIVDIGYPRRRS

SEQ ID NO: 26643 - protein, 20 aa, Artificial Sequence
  Synthetic polypeptide
QSETPSQKKIVDIGYPRRRS

SEQ ID NO: 26644 - protein, 20 aa, Artificial Sequence
  Synthetic polypeptide
QSETPSQKKIVDIGYPRRRS

SEQ ID NO: 26645 - protein, 20 aa, Artificial Sequence
  Synthetic polypeptide
QSETPSQKKIVDIGYPRRRS

SEQ ID NO: 26646 - protein, 48 aa, Artificial Sequence
  Synthetic polypeptide
TWEAEGSLSQDHATALQPGDRARLHLKKKLWTSDTQGDEAEAGEGGEN

SEQ ID NO: 26647 - protein, 48 aa, Artificial Sequence; identical to SEQ ID NO: 26646
  Synthetic polypeptide

SEQ ID NO: 26648 - protein, 48 aa, Artificial Sequence; identical to SEQ ID NO: 26646
  Synthetic polypeptide

SEQ ID NO: 26649 - protein, 48 aa, Artificial Sequence; identical to SEQ ID NO: 26646
  Synthetic polypeptide

SEQ ID NO: 26650 - protein, 48 aa, Artificial Sequence; identical to SEQ ID NO: 26646
  Synthetic polypeptide

SEQ ID NO: 26651 - protein, 48 aa, Artificial Sequence; identical to SEQ ID NO: 26646
  Synthetic polypeptide

SEQ ID NO: 26652 - protein, 48 aa, Artificial Sequence; identical to SEQ ID NO: 26646
  Synthetic polypeptide

SEQ ID NO: 26653 - protein, 48 aa, Artificial Sequence; identical to SEQ ID NO: 26646
  Synthetic polypeptide

SEQ ID NO: 26654 - protein, 48 aa, Artificial Sequence; identical to SEQ ID NO: 26646
  Synthetic polypeptide

SEQ ID NO: 26655 - protein, 48 aa, Artificial Sequence; identical to SEQ ID NO: 26646
  Synthetic polypeptide

SEQ ID NO: 26656 - protein, 48 aa, Artificial Sequence; identical to SEQ ID NO: 26646
  Synthetic polypeptide

SEQ ID NO: 26657 - protein, 48 aa, Artificial Sequence; identical to SEQ ID NO: 26646
  Synthetic polypeptide

SEQ ID NO: 26658 - protein, 48 aa, Artificial Sequence; identical to SEQ ID NO: 26646
  Synthetic polypeptide

SEQ ID NO: 26659 - protein, 40 aa, Artificial Sequence
  Synthetic polypeptide
AKITPLHSSLVTERDSISKKNCGHRIPKETKLKQEKEGKI

SEQ ID NO: 26660 - protein, 40 aa, Artificial Sequence; identical to SEQ ID NO: 26659
  Synthetic polypeptide

SEQ ID NO: 26661 - protein, 40 aa, Artificial Sequence; identical to SEQ ID NO: 26659
  Synthetic polypeptide

SEQ ID NO: 26662 - protein, 40 aa, Artificial Sequence; identical to SEQ ID NO: 26659
  Synthetic polypeptide

SEQ ID NO: 26663 - protein, 40 aa, Artificial Sequence; identical to SEQ ID NO: 26659
  Synthetic polypeptide

SEQ ID NO: 26664 - protein, 40 aa, Artificial Sequence; identical to SEQ ID NO: 26659
  Synthetic polypeptide

SEQ ID NO: 26665 - protein, 40 aa, Artificial Sequence; identical to SEQ ID NO: 26659
  Synthetic polypeptide

SEQ ID NO: 26666 - protein, 40 aa, Artificial Sequence; identical to SEQ ID NO: 26659
  Synthetic polypeptide

SEQ ID NO: 26667 - protein, 40 aa, Artificial Sequence; identical to SEQ ID NO: 26659
  Synthetic polypeptide

SEQ ID NO: 26668 - protein, 40 aa, Artificial Sequence; identical to SEQ ID NO: 26659
  Synthetic polypeptide

SEQ ID NO: 26669 - protein, 40 aa, Artificial Sequence; identical to SEQ ID NO: 26659
  Synthetic polypeptide

SEQ ID NO: 26670 - protein, 40 aa, Artificial Sequence; identical to SEQ ID NO: 26659
  Synthetic polypeptide

SEQ ID NO: 26671 - protein, 40 aa, Artificial Sequence; identical to SEQ ID NO: 26659
  Synthetic polypeptide

SEQ ID NO: 26672 - protein, 41 aa, Artificial Sequence
  Synthetic polypeptide
TWEAEGSLSQDHATALQPGDRARLHLKKKLWTSDTQGDEAE

SEQ ID NO: 26673 - protein, 33 aa, Artificial Sequence
  Synthetic polypeptide
AKITPLHSSLVTERDSISKKNCGHRIPKETKLK

SEQ ID NO: 26674 - protein, 40 aa, Artificial Sequence
  Synthetic polypeptide
VHVLCRDMDEAGNHHSQQTIPRTKNRTPHVLTHSRLQGEL

SEQ ID NO: 26675 - protein, 40 aa, Artificial Sequence; identical to SEQ ID NO: 26674
  Synthetic polypeptide

SEQ ID NO: 26676 - protein, 378 aa, Artificial Sequence
  Synthetic polypeptide
LCCYKDTCTRMFIAALFTIAKTWNQPKCPTMIDWIKKMWHIYTMEYYAAIKNDEFMSFVGTWMKLETIILSKLSQGQKTEHRMFSLIADYKESFNTIGNIEEIAYNAVSFTWDVNEEAKIFITVNCLSTDFSSQKGVKGLPLMIQIDTYSYNNRSNKPIHRAYCQIKVFCDKGAERKIRDEERKQNRKKGKGQASQTQCNSSSDGKLAAIPLQKKSDITYFKTMPDLHSQPVLFIPDVHFANLQRTGQVYYNTDDEREGGSVLVKRMFRPMEEEFGPVPSKQMKEEGTKRVLLYVRKETDDVFDALMLKSPTVKGLMEAISEKYGLPVEKIAKLYKKSKKGILVNMDDNIIEHYSNEDTFILNMESMVEGFKVTLMEI

SEQ ID NO: 26677 - protein, 378 aa, Artificial Sequence; identical to SEQ ID NO: 26676
  Synthetic polypeptide

SEQ ID NO: 26678 - protein, 60 aa, Artificial Sequence
  Synthetic polypeptide
EGRTGHRHLSYGSSALACWKMDCPPMVCPDLQPQVEYPTQRRRRTVRPSAQIPRASAQAL

SEQ ID NO: 26679 - protein, 60 aa, Artificial Sequence; identical to SEQ ID NO: 26678
  Synthetic polypeptide

SEQ ID NO: 26680 - protein, 61 aa, Artificial Sequence
  Synthetic polypeptide
QRLGLAKMPGIGGAAEREGLAIGTSVMAALPWHAGRWTALQWCAPIYSPRWNTQPREEDEL

SEQ ID NO: 26681 - protein, 61 aa, Artificial Sequence; identical to SEQ ID NO: 26680
  Synthetic polypeptide

SEQ ID NO: 26682 - protein, 112 aa, Artificial Sequence
  Synthetic polypeptide
EELLRGKDWPSAPQLWQLCLGMLEDGLPSNGVPRSTAPGGIPNPEKKTNCETQCPNPQSLSSGPLTQKQNGLQTTEAKRDAKRMPAKEVTINVTDSIQQMDRSRRITKNCVN

SEQ ID NO: 26683 - protein, 112 aa, Artificial Sequence; identical to SEQ ID NO: 26682
  Synthetic polypeptide

SEQ ID NO: 26684 - protein, 120 aa, Artificial Sequence
  Synthetic polypeptide
NECTFTKMRSNSALRVLFSGSLRLKCRNACCQRWYFTFNGAECSGPLPIEAIIYLDQGSPEMNSTINIHRTSSVEGLCEGIGAGLVDVAIWVGTCSDYPKGDASTGWNSVSRIIIEELPK

SEQ ID NO: 26685 - protein, 120 aa, Artificial Sequence; identical to SEQ ID NO: 26684
  Synthetic polypeptide

SEQ ID NO: 26686 - protein, 14 aa, Artificial Sequence
  Synthetic polypeptide
RMSVHLQRCVQIVL

SEQ ID NO: 26687 - protein, 14 aa, Artificial Sequence
  Synthetic polypeptide
RMSVHLQRCVQIVL

SEQ ID NO: 26688 - protein, 17 aa, Artificial Sequence
  Synthetic polypeptide
LECKFHEGVYIYKDAFK

SEQ ID NO: 26689 - protein, 17 aa, Artificial Sequence
  Synthetic polypeptide
LECKFHEGVYIYKDAFK

SEQ ID NO: 26690 - protein, 125 aa, Artificial Sequence
  Synthetic polypeptide
NVSSMKECTFTKMRSNSALRVLFSGSLRLKCRNACCQRWYFTFNGAECSGPLPIEAIIYLDQGSPEMNSTINIHRTSSVEGLCEGIGAGLVDVAIWVGTCSDYPKGDASTGWNSVSRIIIEELPK

SEQ ID NO: 26691 - protein, 125 aa, Artificial Sequence; identical to SEQ ID NO: 26690
  Synthetic polypeptide

SEQ ID NO: 26692 - protein, 424 aa, Artificial Sequence
  Synthetic polypeptide
AESFGCPPQIYNEKELLQGKLDLLSDTNMVDFAMDVYKNLYSDDIPHALREKRTTVVAQLKQLQAETEPIVKMFEDPETTRQMQSTRDGRMLFDYLADKHGFRQEYLDTLYRYAKFQYECGNYSGAAEYLYFFRVLVPATDRNALSSLWGKLASEILMQNWDAAMEDLTRLKETIDNNSVSSPLQSLQQRTWLIHWSLFVFFNHPKGRDNIIDLFLYQPQYLNAIQTMCPHILRYLTTAVITNKDVRKRRQVLKDLVKVIQQESYTYKDPITEFVECLYVNFDFDGAQKKLRECESVLVNDFFLVACLEDFIENARLFIFETFCRIHQCISINMLADKLNMTPEEAERWIVNLIRNARLDAKIDSKLGHVVMGNNAVSPYQQVIEKTKSLSFRSQMLAMNIEKKLNQNSRSEAPNWATQDSGFY

SEQ ID NO: 26693 - protein, 37 aa, Artificial Sequence
  Synthetic polypeptide
MGRVQGAKPRVLAAHHRYIMKRNYYKVNWTFLVIPTW

SEQ ID NO: 26694 - protein, 37 aa, Artificial Sequence; identical to SEQ ID NO: 26693
  Synthetic polypeptide

SEQ ID NO: 26695 - protein, 37 aa, Artificial Sequence; identical to SEQ ID NO: 26693
  Synthetic polypeptide

SEQ ID NO: 26696 - protein, 37 aa, Artificial Sequence; identical to SEQ ID NO: 26693
  Synthetic polypeptide

SEQ ID NO: 26697 - protein, 18 aa, Artificial Sequence
  Synthetic polypeptide
WEGFKELSREFWLPTTDI

SEQ ID NO: 26698 - protein, 18 aa, Artificial Sequence
  Synthetic polypeptide
WEGFKELSREFWLPTTDI

SEQ ID NO: 26699 - protein, 18 aa, Artificial Sequence
  Synthetic polypeptide
WEGFKELSREFWLPTTDI

SEQ ID NO: 26700 - protein, 18 aa, Artificial Sequence
  Synthetic polypeptide
WEGFKELSREFWLPTTDI

SEQ ID NO: 26701 - protein, 54 aa, Artificial Sequence
  Synthetic polypeptide
AESFGCPPQIYNEKELLQGKLDLLSDTNMVDFAMDVYKNLYSDDIPHVLFCIFN

SEQ ID NO: 26702 - protein, 151 aa, Artificial Sequence
  Synthetic polypeptide
AESFGCPPQIYNEKELLQGKLDLLSDTNMVDFAMDVYKNLYSDDIPHALREKRTTVVAQLKQLQAETEPIVKMFEDPETTRQMQSTRDGRMLFDYLADKHGFRQEYLDTLYRYAKFQYECGNYSGAAEYLYFFRVLMESCYVAQADLKLLA

SEQ ID NO: 26703 - protein, 64 aa, Artificial Sequence
  Synthetic polypeptide
AESFGCPPQIYNEKELLQGKLDLLSDTNMVDFAMDVYKNLYSDDIPHGMVGCSLTTWRTSMVLG

SEQ ID NO: 26704 - protein, 23 aa, Artificial Sequence
  Synthetic polypeptide
VAHHASNPSTLGGQGLRGCGSHL

SEQ ID NO: 26705 - protein, 23 aa, Artificial Sequence
  Synthetic polypeptide
VAHHASNPSTLGGQGLRGCGSHL

SEQ ID NO: 26706 - protein, 23 aa, Artificial Sequence
  Synthetic polypeptide
VAHHASNPSTLGGQGLRGCGSHL

SEQ ID NO: 26707 - protein, 23 aa, Artificial Sequence
  Synthetic polypeptide
VAHHASNPSTLGGQGLRGCGSHL

SEQ ID NO: 26708 - protein, 23 aa, Artificial Sequence
  Synthetic polypeptide
VAHHASNPSTLGGQGLRGCGSHL

SEQ ID NO: 26709 - protein, 23 aa, Artificial Sequence
  Synthetic polypeptide
VAHHASNPSTLGGQGLRGCGSHL

SEQ ID NO: 26710 - protein, 23 aa, Artificial Sequence
  Synthetic polypeptide
VAHHASNPSTLGGQGLRGCGSHL

SEQ ID NO: 26711 - protein, 23 aa, Artificial Sequence
  Synthetic polypeptide
VAHHASNPSTLGGQGLRGCGSHL

SEQ ID NO: 26712 - protein, 23 aa, Artificial Sequence
  Synthetic polypeptide
VAHHASNPSTLGGQGLRGCGSHL

SEQ ID NO: 26713 - protein, 23 aa, Artificial Sequence
  Synthetic polypeptide
VAHHASNPSTLGGQGLRGCGSHL

SEQ ID NO: 26714 - protein, 23 aa, Artificial Sequence
  Synthetic polypeptide
VAHHASNPSTLGGQGLRGCGSHL

SEQ ID NO: 26715 - protein, 23 aa, Artificial Sequence
  Synthetic polypeptide
VAHHASNPSTLGGQGLRGCGSHL

SEQ ID NO: 26716 - protein, 23 aa, Artificial Sequence
  Synthetic polypeptide
VAHHASNPSTLGGQGLRGCGSHL

SEQ ID NO: 26717 - protein, 23 aa, Artificial Sequence
  Synthetic polypeptide
VAHHASNPSTLGGQGLRGCGSHL

SEQ ID NO: 26718 - protein, 23 aa, Artificial Sequence
  Synthetic polypeptide
VAHHASNPSTLGGQGLRGCGSHL

SEQ ID NO: 26719 - protein, 244 aa, Artificial Sequence
  Synthetic polypeptide
WLITPLIPALWEAKAFGAVEAISDRICIHTNAHVSVEVSAEDLLTCCGSMCGDGCNGGYPAEAWNFWTRKGLVSGGLYESHVGCRPYSIPPCEHHVNGSRPPCTGEGDTPKCSKICEPGYSPTYKQDKHYGYNSYSVSNSEKDIMAEIYKNGPVEGAFSVYSDFLLYKSGVYQHVTGEMMGGHAIRILGWGVENGTPYWLVANSWNTDWGDNGFFKILRGQDHCGIESEVVAGIPRTDQYWEKI

SEQ ID NO: 26720 - protein, 244 aa, Artificial Sequence; identical to SEQ ID NO: 26719
  Synthetic polypeptide

SEQ ID NO: 26721 - protein, 244 aa, Artificial Sequence; identical to SEQ ID NO: 26719
  Synthetic polypeptide

SEQ ID NO: 26722 - protein, 244 aa, Artificial Sequence; identical to SEQ ID NO: 26719
  Synthetic polypeptide

SEQ ID NO: 26723 - protein, 244 aa, Artificial Sequence; identical to SEQ ID NO: 26719
  Synthetic polypeptide

SEQ ID NO: 26724 - protein, 244 aa, Artificial Sequence; identical to SEQ ID NO: 26719
  Synthetic polypeptide

SEQ ID NO: 26725 - protein, 244 aa, Artificial Sequence; identical to SEQ ID NO: 26719
  Synthetic polypeptide

SEQ ID NO: 26726 - protein, 244 aa, Artificial Sequence; identical to SEQ ID NO: 26719
  Synthetic polypeptide

SEQ ID NO: 26727 - protein, 75 aa, Artificial Sequence
  Synthetic polypeptide
SQHFGRPRPSGLWKPSLTGSASTPMRTSAWRCRRRTCSHAVAACVGTAVMVAILLKLGTSGQEKAWFLVASMNPM

SEQ ID NO: 26728 - protein, 75 aa, Artificial Sequence; identical to SEQ ID NO: 26727
  Synthetic polypeptide

SEQ ID NO: 26729 - protein, 75 aa, Artificial Sequence; identical to SEQ ID NO: 26727
  Synthetic polypeptide

SEQ ID NO: 26730 - protein, 75 aa, Artificial Sequence; identical to SEQ ID NO: 26727
  Synthetic polypeptide

SEQ ID NO: 26731 - protein, 75 aa, Artificial Sequence; identical to SEQ ID NO: 26727
  Synthetic polypeptide

SEQ ID NO: 26732 - protein, 75 aa, Artificial Sequence; identical to SEQ ID NO: 26727
  Synthetic polypeptide

SEQ ID NO: 26733 - protein, 75 aa, Artificial Sequence; identical to SEQ ID NO: 26727
  Synthetic polypeptide

SEQ ID NO: 26734 - protein, 75 aa, Artificial Sequence; identical to SEQ ID NO: 26727
  Synthetic polypeptide

SEQ ID NO: 26735 - protein, 80 aa, Artificial Sequence
  Synthetic polypeptide
WLITPLIPALWEAKAFGAVEAISDRICIHTNAHVSVEVSAEDLLTCCGSMCGDGCNGGYPAEAWNFWTRKGLVSGGLYES

SEQ ID NO: 26736 - protein, 73 aa, Artificial Sequence
  Synthetic polypeptide
SQHFGRPRPSGLWKPSLTGSASTPMRTSAWRCRRRTCSHAVAACVGTAVMVAILLKLGTSGQEKAWFLVASMN

SEQ ID NO: 26737 - protein, 75 aa, Artificial Sequence
  Synthetic polypeptide
WLITPLIPALWEAKAFGAVEAISDRICIHTNAHVSVEVSAEDLLTCCGSMCGDGCNGGYPAEAWNFWTRKGLVSG

SEQ ID NO: 26738 - protein, 68 aa, Artificial Sequence
  Synthetic polypeptide
SQHFGRPRPSGLWKPSLTGSASTPMRTSAWRCRRRTCSHAVAACVGTAVMVAILLKLGTSGQEKAWFL

SEQ ID NO: 26739 - protein, 70 aa, Artificial Sequence
  Synthetic polypeptide
WLITPLIPALWEAKAFGAVEAISDRICIHTNAHVSVEVSAEDLLTCCGSMCGDGCNGGYPAEAWNFWTRK

SEQ ID NO: 26740 - protein, 63 aa, Artificial Sequence
  Synthetic polypeptide
SQHFGRPRPSGLWKPSLTGSASTPMRTSAWRCRRRTCSHAVAACVGTAVMVAILLKLGTSGQE

SEQ ID NO: 26741 - protein, 53 aa, Artificial Sequence
  Synthetic polypeptide
WLITPLIPALWEAKAFGAVEAISDRICIHTNAHVSVEVSAEDLLTCCGSMCGD

SEQ ID NO: 26742 - protein, 47 aa, Artificial Sequence
  Synthetic polypeptide
SQHFGRPRPSGLWKPSLTGSASTPMRTSAWRCRRRTCSHAVAACVGT

SEQ ID NO: 26743 - protein, 48 aa, Artificial Sequence
  Synthetic polypeptide
WLITPLIPALWEAKAFGAVEAISDRICIHTNAHVSVEVSAEDLLTCCG

SEQ ID NO: 26744 - protein, 48 aa, Artificial Sequence; identical to SEQ ID NO: 26743
  Synthetic polypeptide

SEQ ID NO: 26745 - protein, 42 aa, Artificial Sequence
  Synthetic polypeptide
SQHFGRPRPSGLWKPSLTGSASTPMRTSAWRCRRRTCSHAVA

SEQ ID NO: 26746 - protein, 42 aa, Artificial Sequence; identical to SEQ ID NO: 26745
  Synthetic polypeptide

SEQ ID NO: 26747 - protein, 41 aa, Artificial Sequence
  Synthetic polypeptide
WLITPLIPALWEAKAFGAVEAISDRICIHTNAHVSVEVSAE

SEQ ID NO: 26748 - protein, 34 aa, Artificial Sequence
  Synthetic polypeptide
SQHFGRPRPSGLWKPSLTGSASTPMRTSAWRCRR

SEQ ID NO: 26749 - protein, 74 aa, Artificial Sequence
  Synthetic polypeptide
PCALAMPGLLCHQICLILAHLRHSVLVFSFAYNIFGIADSSFTFSLSSPQRDTLIMLSKQSFGEESTVADGQSG

SEQ ID NO: 26750 - protein, 74 aa, Artificial Sequence; identical to SEQ ID NO: 26749
  Synthetic polypeptide

SEQ ID NO: 26751 - protein, 74 aa, Artificial Sequence; identical to SEQ ID NO: 26749
  Synthetic polypeptide

SEQ ID NO: 26752 - protein, 121 aa, Artificial Sequence
  Synthetic polypeptide
SCYLNNHLGKNLQLLMDRVDEMSQDIVKYNTYMRNTSKQQQQKHQYQQRRQQENMQRQSRGEPPLPEEDLSKLFKPPQPPARMDSLLIAGQINTYCQNIKEFTAQNLGKLFMAQALQEYNN

SEQ ID NO: 26753 - protein, 121 aa, Artificial Sequence; identical to SEQ ID NO: 26752
  Synthetic polypeptide

SEQ ID NO: 26754 - protein, 45 aa, Artificial Sequence
  Synthetic polypeptide
SCYLNNHLGKNLQLLMDRVDEMSQDIVKYNTYMRNTSKQQQQKHQ

SEQ ID NO: 26755 - protein, 50 aa, Artificial Sequence
  Synthetic polypeptide
GLSSQAELEQWQKPLMKHFPLRQQRQYLKTMKHLLSPFVPSSFFLILIAP

SEQ ID NO: 26756 - protein, 50 aa, Artificial Sequence; identical to SEQ ID NO: 26755
  Synthetic polypeptide

SEQ ID NO: 26757 - protein, 50 aa, Artificial Sequence
  Synthetic polypeptide
WFKSVWQFTSLLAVLPPREEGPYFPFAFCHNCKFPEASPAKQNWNNGKSL

SEQ ID NO: 26758 - protein, 50 aa, Artificial Sequence; identical to SEQ ID NO: 26757
  Synthetic polypeptide

SEQ ID NO: 26759 - protein, 92 aa, Artificial Sequence
  Synthetic polypeptide
VLTRSDGLKVFGSSPHCSLSCLHVKKVLTSPLPSATIVSFLRPLQPSRTGTMAKAFDEAFSSETTAAIPEDHEASAESFCSIFFLPDLDRPL

SEQ ID NO: 26760 - protein, 98 aa, Artificial Sequence
  Synthetic polypeptide
VLTRSDGLKVFGSSPHCSLSCLHVKKVLTSPLPSATIVSFLRPLQPSRTGTMAKAFDEAFSSETTAAIPEDHEASAESFCSIFFLPDLDRPLMHLHPE

SEQ ID NO: 26761 - protein, 9 aa, Artificial Sequence
  Synthetic polypeptide
GLPSHIKPR

SEQ ID NO: 26762 - protein, 229 aa, Artificial Sequence
  Synthetic polypeptide
NRDDGEKGDPGEEGKHGKVGRMGPKGIKGELGDMGDQGNIGKTGPIGKKGDKGEKGLLGIPGEKGKAGTVCDCGRYRKFVGQLDISIARLKTSMKFVKNVIAGIRETEEKFYYIVQEEKNYRESLTHCRIRGGMLAMPKDEAANTLIADYVAKSGFFRVFIGVNDLEREGQYMFTDNTPLQNYSNWNEGEPSDPYGHEDCVEMLSSGRWNDTECHLTMYFVCEFIKKKK

SEQ ID NO: 26763 - protein, 108 aa, Artificial Sequence
  Synthetic polypeptide
YLPSAMIVRPPQPHKTEMMVKKEIQEKRESMAKWDAWGRKELKENWVIWEIRAILARLGPLGRRVTKGKKVCLEYLEKKAKQVLSVIVEDTGNLLDNWILVLLGSRHL

SEQ ID NO: 26764 - protein, 230 aa, Artificial Sequence
  Synthetic polypeptide
QHRDDGEKGDPGEEGKHGKVGRMGPKGIKGELGDMGDQGNIGKTGPIGKKGDKGEKGLLGIPGEKGKAGTVCDCGRYRKFVGQLDISIARLKTSMKFVKNVIAGIRETEEKFYYIVQEEKNYRESLTHCRIRGGMLAMPKDEAANTLIADYVAKSGFFRVFIGVNDLEREGQYMFTDNTPLQNYSNWNEGEPSDPYGHEDCVEMLSSGRWNDTECHLTMYFVCEFIKKKK

SEQ ID NO: 26765 - protein, 94 aa, Artificial Sequence
  Synthetic polypeptide
NIEMMVKKEIQEKRESMAKWDAWGRKELKENWVIWEIRAILARLGPLGRRVTKGKKVCLEYLEKKAKQVLSVIVEDTGNLLDNWILVLLGSRHL

SEQ ID NO: 26766 - protein, 32 aa, Artificial Sequence
  Synthetic polypeptide
SQDGRIGTAPVYSSQRERCRRWVISAFPSEAA

SEQ ID NO: 26767 - protein, 32 aa, Artificial Sequence; identical to SEQ ID NO: 26766
  Synthetic polypeptide

SEQ ID NO: 26768 - protein, 282 aa, Artificial Sequence
  Synthetic polypeptide
FLHFHLRQLEIHSPDAKHTVILRSKDSATAQAWFSAIHSNVNDLLTRVIAEVREQLGKTGIAGSREIRHLGWLAEKVPGESKKQWKPALVVLTEKDLLIYDSMPRRKEAWFSPVHTYPLLATRLVHSGPGKGSPQAGVDLSFATRTGTRQGIETHLFRAETSRDLSHWTRSIVQGCHNSAELIAEISTACTYKNQECRLTIHYENGFSITTEPQEGAFPKTIIQSPYEKLKMSSDDGIRMLYLDFGGKDGEIQLDLHSCPKPIVFIIHSFLSAKITRLGLVA

SEQ ID NO: 26769 - protein, 282 aa, Artificial Sequence; identical to SEQ ID NO: 26768
  Synthetic polypeptide

SEQ ID NO: 26770 - protein, 13 aa, Artificial Sequence
  Synthetic polypeptide
WICLTSSAILVST

SEQ ID NO: 26771 - protein, 13 aa, Artificial Sequence
  Synthetic polypeptide
WICLTSSAILVST

SEQ ID NO: 26772 - protein, 13 aa, Artificial Sequence
  Synthetic polypeptide
WICLTSSAILVST

SEQ ID NO: 26773 - protein, 13 aa, Artificial Sequence
  Synthetic polypeptide
WICLTSSAILVST

SEQ ID NO: 26774 - protein, 13 aa, Artificial Sequence
  Synthetic polypeptide
WICLTSSAILVST

SEQ ID NO: 26775 - protein, 13 aa, Artificial Sequence
  Synthetic polypeptide
WICLTSSAILVST

SEQ ID NO: 26776 - protein, 13 aa, Artificial Sequence
  Synthetic polypeptide
WICLTSSAILVST

SEQ ID NO: 26777 - protein, 18 aa, Artificial Sequence
  Synthetic polypeptide
LSDNGSALPVLRYWYQLD

SEQ ID NO: 26778 - protein, 18 aa, Artificial Sequence
  Synthetic polypeptide
LSDNGSALPVLRYWYQLD

SEQ ID NO: 26779 - protein, 18 aa, Artificial Sequence
  Synthetic polypeptide
LSDNGSALPVLRYWYQLD

SEQ ID NO: 26780 - protein, 18 aa, Artificial Sequence
  Synthetic polypeptide
LSDNGSALPVLRYWYQLD

SEQ ID NO: 26781 - protein, 18 aa, Artificial Sequence
  Synthetic polypeptide
LSDNGSALPVLRYWYQLD

SEQ ID NO: 26782 - protein, 18 aa, Artificial Sequence
  Synthetic polypeptide
LSDNGSALPVLRYWYQLD

SEQ ID NO: 26783 - protein, 18 aa, Artificial Sequence
  Synthetic polypeptide
LSDNGSALPVLRYWYQLD

SEQ ID NO: 26784 - protein, 311 aa, Artificial Sequence
  Synthetic polypeptide
YQCLLLIFHNCLIMDLPYQFCDIGINLTDPMFRGIYRGVQKHQDDLQDVIGRAVEIGVKKFMITGGNLQDSKDALHLAQTNGMFFSTVGCHPTRCGEFEKNNPDLYLKELLNLAENNKGKVVAIGECGLDFDRLQFCPKDTQLKYFEKQFELSEQTKLPMFLHCRNSHAEFLDIMKRNRDRCVGGVVHSFDGTKEAAAALIDLDLYIGFNGCSLKTEANLEVLKSIPSEKLMIETDAPWCGVKSTHAGSKYIRTAFPTKKKWESGHCLKDRNEPCHIIQILEIMSAVRDEDPLELANTLYNNTIKVFFPGI

SEQ ID NO: 26785 - protein, 221 aa, Artificial Sequence
  Synthetic polypeptide
YQCLLLIFHNCLIMDLPYQFCDIGINLTDPMFRGIYRGVQKHQDDLQDVIGRAVEIGVKKFMITGGNLQDSKDALHLAQTNGMFFSTVGCHPTRCGEFEKNNPDLYLKELLNLAENNKGKVVAIGECGLDFDRLQFCPKDTQLKYFEKQFELSEQTKLPMFLHCRNSHAEFLDIMKRNRDRCVGGVVHSFDGTKEAAAALIDLDLYIGFNGCIMYTYTRHI

SEQ ID NO: 26786 - protein, 336 aa, Artificial Sequence
  Synthetic polypeptide
YQCLLLIFHNCLIMDLPYQFCDIGINLTDPMFRGIYRGVQKHQDDLQDVIGRAVEIGVKKFMITGGNLQDSKDALHLAQTNGMFFSTVGCHPTRCGEFEKNNPDLYLKELLNLAENNKGKVVAIGECGLDFDRLQFCPKDTQLKYFEKQFELSEQTKLPMFLHCRNSHAEFLDIMKRNRDRCVGGVVHSFDGTKEAAAALIDLDLYIGFNALCIHIHVISDYGRTVYSVTVIHLCSQRNRGSKKLGNSSLKTEANLEVLKSIPSEKLMIETDAPWCGVKSTHAGSKYIRTAFPTKKKWESGHCLKDRNEPCHIIQILEIMSAVRDEDPLELANTLY

SEQ ID NO: 26787 - protein, 54 aa, Artificial Sequence
  Synthetic polypeptide
YQCLLLIFHNCLIMDLPYQFCDIGINLTDPMFRGIYRGVQKHQVYDYRWKSTRQ

SEQ ID NO: 26788 - protein, 54 aa, Artificial Sequence; identical to SEQ ID NO: 26787
  Synthetic polypeptide

SEQ ID NO: 26789 - protein, 224 aa, Artificial Sequence
  Synthetic polypeptide
YQCLLLIFHNCLIMDLPYQFCDIGINLTDPMFRGIYRGVQKHQDDLQDVIGRAVEIGVKKFMITGGNLQDSKDALHLAQTNGMFFSTVGCHPTRCGEFEKNNPDLYLKELLNLAENNKGKVVAIGECGLDFDRLQFCPKDTQLKYFEKQFELSEQTKLPMFLHCRNSHAEFLDIMKRNRDRCVGGVVHSFDGTKEAAAALIDLDLYIGFNGWYVLRLLWFLTFI

SEQ ID NO: 26790 - protein, 186 aa, Artificial Sequence
  Synthetic polypeptide
YQCLLLIFHNCLIMDLPYQFCDIGINLTDPMFRGIYRGVQKHQDDLQDVIGRAVEIGVKKFMITGGNLQDSKDALHLAQTNGMFFSTVGCHPTRCGEFEKNNPDLYLKELLNLAENNKGKVVAIGECGLDFDRLQFCPKDTQLKYFEKQFELSEQTKLPMFLHCRNSHAEFLDIMKRNRDRCVGGV

SEQ ID NO: 26791 - protein, 52 aa, Artificial Sequence
  Synthetic polypeptide
FQLLGRLKWEDHLSPGVQDQPGQHSERRTSRKNTRFKIIGREEIFGFTEQEF

SEQ ID NO: 26792 - protein, 52 aa, Artificial Sequence; identical to SEQ ID NO: 26791
  Synthetic polypeptide

SEQ ID NO: 26793 - protein, 52 aa, Artificial Sequence; identical to SEQ ID NO: 26791
  Synthetic polypeptide

SEQ ID NO: 26794 - protein, 52 aa, Artificial Sequence; identical to SEQ ID NO: 26791
  Synthetic polypeptide

SEQ ID NO: 26795 - protein, 52 aa, Artificial Sequence; identical to SEQ ID NO: 26791
  Synthetic polypeptide

SEQ ID NO: 26796 - protein, 62 aa, Artificial Sequence
  Synthetic polypeptide
AQEFKISLDNIVKEERPEKIPDLKLLVEKKFLALQSKNSDADFQNNEKFVQFKQQLKELKKQ

SEQ ID NO: 26797 - protein, 116 aa, Artificial Sequence
  Synthetic polypeptide
AQEFKISLDNIVKEERPEKIPDLKLLVEKKFLALQSKNSDADFQNNEKFVQFKQQLKELKKQCGLQADREADGTEGVDEDIIVTQSQTNFTCPITKEEMKKPVKNKVCGHTYEEDA

SEQ ID NO: 26798 - protein, 170 aa, Artificial Sequence
  Synthetic polypeptide
AQEFKISLDNIVKEERPEKIPDLKLLVEKKFLALQSKNSDADFQNNEKFVQFKQQLKELKKQCGLQADREADGTEGVDEDIIVTQSQTNFTCPITKEEMKKPVKNKVCGHTYEEDAIVRMIESRQKRKKKAYCPQIGCSHTDIRKSDLIQDEALRRAIENHNKKRHRHSE

SEQ ID NO: 26799 - protein, 170 aa, Artificial Sequence; identical to SEQ ID NO: 26798
  Synthetic polypeptide

SEQ ID NO: 26800 - protein, 170 aa, Artificial Sequence; identical to SEQ ID NO: 26798
  Synthetic polypeptide

SEQ ID NO: 26801 - protein, 110 aa, Artificial Sequence
  Synthetic polypeptide
GRGRSLPRRCPSTLASPTGTMTSTTTRCSRISTATRRRTSTSSSSRASCSPRRPARISGRNSSCCPPRPCPLAAAPGSARPPTLRSHPSPFGETTTAVAGASPRPTSWRW

SEQ ID NO: 26802 - protein, 13 aa, Artificial Sequence
  Synthetic polypeptide
DGGAASRDDAPQR

SEQ ID NO: 26803 - protein, 447 aa, Artificial Sequence
  Synthetic polypeptide
TGAQPPATMPLNVSFTNRNYDLDYDSVQPYFYCDEEENFYQQQQQSELQPPAPSEDIWKKFELLPTPPLSPSRRSGLCSPSYVAVTPFSLRGDNDGGGGSFSTADQLEMVTELLGGDMVNQSFICDPDDETFIKNIIIQDCMWSGFSAAAKLVSEKLASYQAARKDSGSPNPARGHSVCSTSSLYLQDLSAAASECIDPSVVFPYPLNDSSSPKSCASQDSSAFSPSSDSLLSSTESSPQGSPEPLVLHEETPPTTSSDSEEEQEDEEEIDVVSVEKRQAPGKRSESGSPSAGGHSKPPHSPLVLKRCHVSTHQHNYAAPPSTRKDYPAAKRVKLDSVRVLRQISNNRKCTSPRSSDTEENVKRRTHNVLERQRRNELKRSFFALRDQIPELENNEKAPKVVILKKATAYILSVQAEEQKLISEEDLLRKRREQLKHKLEQLRNSCA

SEQ ID NO: 26804 - protein, 51 aa, Artificial Sequence
  Synthetic polypeptide
AGHGDTHLSSQLLVSPRQEDCLSPGIEGQPGYTTKHLNDETTSKQIKSMLQ

SEQ ID NO: 26805 - protein, 51 aa, Artificial Sequence; identical to SEQ ID NO: 26804
  Synthetic polypeptide

SEQ ID NO: 26806 - protein, 51 aa, Artificial Sequence; identical to SEQ ID NO: 26804
  Synthetic polypeptide

SEQ ID NO: 26807 - protein, 51 aa, Artificial Sequence; identical to SEQ ID NO: 26804
  Synthetic polypeptide

SEQ ID NO: 26808 - protein, 51 aa, Artificial Sequence; identical to SEQ ID NO: 26804
  Synthetic polypeptide

SEQ ID NO: 26809 - protein, 51 aa, Artificial Sequence; identical to SEQ ID NO: 26804
  Synthetic polypeptide

SEQ ID NO: 26810 - protein, 51 aa, Artificial Sequence; identical to SEQ ID NO: 26804
  Synthetic polypeptide

SEQ ID NO: 26811 - protein, 51 aa, Artificial Sequence; identical to SEQ ID NO: 26804
  Synthetic polypeptide

SEQ ID NO: 26812 - protein, 51 aa, Artificial Sequence; identical to SEQ ID NO: 26804
  Synthetic polypeptide

SEQ ID NO: 26813 - protein, 14 aa, Artificial Sequence
  Synthetic polypeptide
AQELKANRGTQQNI

SEQ ID NO: 26814 - protein, 14 aa, Artificial Sequence
  Synthetic polypeptide
AQELKANRGTQQNI

SEQ ID NO: 26815 - protein, 14 aa, Artificial Sequence
  Synthetic polypeptide
AQELKANRGTQQNI

SEQ ID NO: 26816 - protein, 14 aa, Artificial Sequence
  Synthetic polypeptide
AQELKANRGTQQNI

SEQ ID NO: 26817 - protein, 14 aa, Artificial Sequence
  Synthetic polypeptide
AQELKANRGTQQNI

SEQ ID NO: 26818 - protein, 14 aa, Artificial Sequence
  Synthetic polypeptide
AQELKANRGTQQNI

SEQ ID NO: 26819 - protein, 14 aa, Artificial Sequence
  Synthetic polypeptide
AQELKANRGTQQNI

SEQ ID NO: 26820 - protein, 14 aa, Artificial Sequence
  Synthetic polypeptide
AQELKANRGTQQNI

SEQ ID NO: 26821 - protein, 14 aa, Artificial Sequence
  Synthetic polypeptide
AQELKANRGTQQNI

SEQ ID NO: 26822 - protein, 11 aa, Artificial Sequence
  Synthetic polypeptide
RPTGVHNKTFE

SEQ ID NO: 26823 - protein, 11 aa, Artificial Sequence
  Synthetic polypeptide
RPTGVHNKTFE

SEQ ID NO: 26824 - protein, 11 aa, Artificial Sequence
  Synthetic polypeptide
RPTGVHNKTFE

SEQ ID NO: 26825 - protein, 11 aa, Artificial Sequence
  Synthetic polypeptide
RPTGVHNKTFE

SEQ ID NO: 26826 - protein, 11 aa, Artificial Sequence
  Synthetic polypeptide
RPTGVHNKTFE

SEQ ID NO: 26827 - protein, 11 aa, Artificial Sequence
  Synthetic polypeptide
RPTGVHNKTFE

SEQ ID NO: 26828 - protein, 11 aa, Artificial Sequence
  Synthetic polypeptide
RPTGVHNKTFE

SEQ ID NO: 26829 - protein, 11 aa, Artificial Sequence
  Synthetic polypeptide
RPTGVHNKTFE

SEQ ID NO: 26830 - protein, 11 aa, Artificial Sequence
  Synthetic polypeptide
RPTGVHNKTFE

SEQ ID NO: 26831 - protein, 415 aa, Artificial Sequence
  Synthetic polypeptide
EKAQALASENVSKLKKLEYLNLALNNIEKIENLEGCEELAKLDLTVNFIGELSSIKNLQHNIHLKELFLMGNPCASFDHYREFVVATLPQLKWLDGKEIEPSERIKALQDYSVIEPQIREQEKDHCLKRAKLKEEAQRKHQEEDKNEDKRSNAGFDGRWYTDINATLSSLESKDHLQAPDTEEHNTKKLDNSEDDLEFWNKPCLFTPESRLETLRHMEKQRKKQEKLSEKKKKVKPPRTLITEDGKALNVNEPKIDFSLKDNEKQIILDLAVYRYMDTSLIDVDVQPTYVRVMIKGKPFQLVLPAEVKPDSSSAKRSQTTGHLVICMPKVGEVITGGQRAFKSMKTTSDRSREQTNTRSKHMEKLEVDPSKHSFPDVTNIVQEKKHTPRRRPEPKIIPSEEDPTFEDNPEVPPLI

SEQ ID NO: 26832 - protein, 415 aa, Artificial Sequence; identical to SEQ ID NO: 26831
  Synthetic polypeptide

SEQ ID NO: 26833 - protein, 19 aa, Artificial Sequence
  Synthetic polypeptide
RKHRLWHQKMLANSRNLNI

SEQ ID NO: 26834 - protein, 19 aa, Artificial Sequence
  Synthetic polypeptide
RKHRLWHQKMLANSRNLNI

SEQ ID NO: 26835 - protein, 19 aa, Artificial Sequence
  Synthetic polypeptide
RKHRLWHQKMLANSRNLNI

SEQ ID NO: 26836 - protein, 19 aa, Artificial Sequence
  Synthetic polypeptide
RKHRLWHQKMLANSRNLNI

SEQ ID NO: 26837 - protein, 10 aa, Artificial Sequence
  Synthetic polypeptide
ESTGSGIRKC

SEQ ID NO: 26838 - protein, 10 aa, Artificial Sequence
  Synthetic polypeptide
ESTGSGIRKC

SEQ ID NO: 26839 - protein, 10 aa, Artificial Sequence
  Synthetic polypeptide
ESTGSGIRKC

SEQ ID NO: 26840 - protein, 10 aa, Artificial Sequence
  Synthetic polypeptide
ESTGSGIRKC

SEQ ID NO: 26841 - protein, 360 aa, Artificial Sequence
  Synthetic polypeptide
EKAQALASENVSKLKKLEYLNLALNNIEKIENLEGCEELAKLDLTVNFIGELSSIKNLQHNIHLKELFLMGNPCASFDHYREFVVATLPQLKWLDGKEIEPSERIKALQDYSVIEPQIREQEKDHCLKRAKLKEEAQRKHQEEDKNEDKRSNAGFDGRWYTDINATLSSLESKDHLQAPDTEEHNTKKLDNSEDDLEFWNKPCLFTPESRLETLRHMEKQRKKQEKLSEKKKKVKPPRTLITEDGKALNVNEPKIDFSLKDNEKQIILDLAVYRYMDTSLIDVDVQPTYVRVMIKGKLVLPAEVKPDSSSAKRSQTTGHLVICMPKVGEVITGGQRAFKSMKTTSDRSREQTNTSYSTGF

SEQ ID NO: 26842 - protein, 38 aa, Artificial Sequence
  Synthetic polypeptide
EKAQALASENVSKLKKLEYLNLALNNIEKIENLEDVIY

SEQ ID NO: 26843 - protein, 15 aa, Artificial Sequence
  Synthetic polypeptide
EAIDRVHVPLHGSAG

SEQ ID NO: 26844 - protein, 15 aa, Artificial Sequence
  Synthetic polypeptide
EAIDRVHVPLHGSAG

SEQ ID NO: 26845 - protein, 15 aa, Artificial Sequence
  Synthetic polypeptide
EAIDRVHVPLHGSAG

SEQ ID NO: 26846 - protein, 15 aa, Artificial Sequence
  Synthetic polypeptide
EAIDRVHVPLHGSAG

SEQ ID NO: 26847 - protein, 15 aa, Artificial Sequence
  Synthetic polypeptide
EAIDRVHVPLHGSAG

SEQ ID NO: 26848 - protein, 15 aa, Artificial Sequence
  Synthetic polypeptide
EAIDRVHVPLHGSAG

SEQ ID NO: 26849 - protein, 15 aa, Artificial Sequence
  Synthetic polypeptide
EAIDRVHVPLHGSAG

SEQ ID NO: 26850 - protein, 15 aa, Artificial Sequence
  Synthetic polypeptide
EAIDRVHVPLHGSAG

SEQ ID NO: 26851 - protein, 15 aa, Artificial Sequence
  Synthetic polypeptide
EAIDRVHVPLHGSAG

SEQ ID NO: 26852 - protein, 15 aa, Artificial Sequence
  Synthetic polypeptide
EAIDRVHVPLHGSAG

SEQ ID NO: 26853 - protein, 15 aa, Artificial Sequence
  Synthetic polypeptide
EAIDRVHVPLHGSAG

SEQ ID NO: 26854 - protein, 15 aa, Artificial Sequence
  Synthetic polypeptide
EAIDRVHVPLHGSAG

SEQ ID NO: 26855 - protein, 15 aa, Artificial Sequence
  Synthetic polypeptide
EAIDRVHVPLHGSAG

SEQ ID NO: 26856 - protein, 307 aa, Artificial Sequence
  Synthetic polypeptide
KLNELIPRMCPWDLERRKQLIEYMYPSMDQLAEMLPGVLQQFGLKSIIGMGTGAGAYILTRFALNNPEMVEGLVLINVNPCAEGWMDWAASKISGWTQALPDMVVSHLFGKEEMQSNVEVVHTYRQHIVNDMNPGNLHLFINAYNSRRDLEIERPMPGTHTVTLQCPALLVVGDSSPAVDAVVECNSKLDPTKTTLLKMADCGGLPQISQPAKLAEAFKYFVQGMGYMPSASMTRLMRSRTASGSSVTSLDGTRSRSHTSEGTRSRSHTSEGTRSRSHTSEGAHLDITPNSGAAGNSAGPKSMEVSC

SEQ ID NO: 26857 - protein, 307 aa, Artificial Sequence; identical to SEQ ID NO: 26856
  Synthetic polypeptide

SEQ ID NO: 26858 - protein, 307 aa, Artificial Sequence; identical to SEQ ID NO: 26856
  Synthetic polypeptide

SEQ ID NO: 26859 - protein, 307 aa, Artificial Sequence; identical to SEQ ID NO: 26856
  Synthetic polypeptide

SEQ ID NO: 26860 - protein, 44 aa, Artificial Sequence
  Synthetic polypeptide
KLNELIPRMCPWDLERRKQLIEYMYPSMDQLAEMLPGVLQQFGL

SEQ ID NO: 26861 - protein, 129 aa, Artificial Sequence
  Synthetic polypeptide
KLNELIPRMCPWDLERRKQLIEYMYPSMDQLAEMLPGVLQQFGLKSIIGMGTGAGAYILTRFALNNPEMVEGLVLINVNPCAEGWMDWAASKPFDYQALVLDTVMCAVTSCSPSLDLVALKFLALPVPD

SEQ ID NO: 26862 - protein, 89 aa, Artificial Sequence
  Synthetic polypeptide
KLNELIPRMCPWDLERRKQLIEYMYPSMDQLAEMLPGVLQQFGLKSIIGMGTGAGAYILTRFALNNPEMVEGLVLINVNPCAEGWMDWA

SEQ ID NO: 26863 - protein, 79 aa, Artificial Sequence
  Synthetic polypeptide
KLNELIPRMCPWDLERRKQLIEYMYPSMDQLAEMLPGVLQQFGLKSIIGMGTGAGAYILTRFALNNPEMVEGLVLINVN

SEQ ID NO: 26864 - protein, 78 aa, Artificial Sequence
  Synthetic polypeptide
KLNELIPRMCPWDLERRKQLIEYMYPSMDQLAEMLPGVLQQFGLKSIIGMGTGAGAYILTRFALNNPEMVEGLVLINV

SEQ ID NO: 26865 - protein, 71 aa, Artificial Sequence
  Synthetic polypeptide
KLNELIPRMCPWDLERRKQLIEYMYPSMDQLAEMLPGVLQQFGLKSIIGMGTGAGAYILTRFALNNPEMVE

SEQ ID NO: 26866 - protein, 71 aa, Artificial Sequence; identical to SEQ ID NO: 26865
  Synthetic polypeptide

SEQ ID NO: 26867 - protein, 58 aa, Artificial Sequence
  Synthetic polypeptide
KLNELIPRMCPWDLERRKQLIEYMYPSMDQLAEMLPGVLQQFGLKSIIGMGTGAGAYI

SEQ ID NO: 26868 - protein, 46 aa, Artificial Sequence
  Synthetic polypeptide
KLNELIPRMCPWDLERRKQLIEYMYPSMDQLAEMLPGVLQQFGLKS

SEQ ID NO: 26869 - protein, 9 aa, Artificial Sequence
  Synthetic polypeptide
EAIDRVHVP

SEQ ID NO: 26870 - protein, 26 aa, Artificial Sequence
  Synthetic polypeptide
KLNELIPRMCPWDLERRKQLIEYMYP

SEQ ID NO: 26871 - protein, 40 aa, Artificial Sequence
  Synthetic polypeptide
PLQRHFFQEALPDHLSTAGTCTPPWISWLKCFLESFNSLG

SEQ ID NO: 26872 - protein, 40 aa, Artificial Sequence; identical to SEQ ID NO: 26871
  Synthetic polypeptide

SEQ ID NO: 26873 - protein, 40 aa, Artificial Sequence; identical to SEQ ID NO: 26871
  Synthetic polypeptide

SEQ ID NO: 26874 - protein, 40 aa, Artificial Sequence; identical to SEQ ID NO: 26871
  Synthetic polypeptide

SEQ ID NO: 26875 - protein, 40 aa, Artificial Sequence; identical to SEQ ID NO: 26871
  Synthetic polypeptide

SEQ ID NO: 26876 - protein, 40 aa, Artificial Sequence; identical to SEQ ID NO: 26871
  Synthetic polypeptide

SEQ ID NO: 26877 - protein, 40 aa, Artificial Sequence; identical to SEQ ID NO: 26871
  Synthetic polypeptide

SEQ ID NO: 26878 - protein, 40 aa, Artificial Sequence; identical to SEQ ID NO: 26871
  Synthetic polypeptide

SEQ ID NO: 26879 - protein, 40 aa, Artificial Sequence; identical to SEQ ID NO: 26871
  Synthetic polypeptide

SEQ ID NO: 26880 - protein, 40 aa, Artificial Sequence; identical to SEQ ID NO: 26871
  Synthetic polypeptide

SEQ ID NO: 26881 - protein, 40 aa, Artificial Sequence; identical to SEQ ID NO: 26871
  Synthetic polypeptide

SEQ ID NO: 26882 - protein, 40 aa, Artificial Sequence; identical to SEQ ID NO: 26871
  Synthetic polypeptide

SEQ ID NO: 26883 - protein, 40 aa, Artificial Sequence; identical to SEQ ID NO: 26871
  Synthetic polypeptide

SEQ ID NO: 26884 - protein, 13 aa, Artificial Sequence
  Synthetic polypeptide
ARQVHVPLHGSAG

SEQ ID NO: 26885 - protein, 13 aa, Artificial Sequence
  Synthetic polypeptide
ARQVHVPLHGSAG

SEQ ID NO: 26886 - protein, 13 aa, Artificial Sequence
  Synthetic polypeptide
ARQVHVPLHGSAG

SEQ ID NO: 26887 - protein, 13 aa, Artificial Sequence
  Synthetic polypeptide
ARQVHVPLHGSAG

SEQ ID NO: 26888 - protein, 13 aa, Artificial Sequence
  Synthetic polypeptide
ARQVHVPLHGSAG

SEQ ID NO: 26889 - protein, 13 aa, Artificial Sequence
  Synthetic polypeptide
ARQVHVPLHGSAG

SEQ ID NO: 26890 - protein, 13 aa, Artificial Sequence
  Synthetic polypeptide
ARQVHVPLHGSAG

SEQ ID NO: 26891 - protein, 13 aa, Artificial Sequence
  Synthetic polypeptide
ARQVHVPLHGSAG

SEQ ID NO: 26892 - protein, 13 aa, Artificial Sequence
  Synthetic polypeptide
ARQVHVPLHGSAG

SEQ ID NO: 26893 - protein, 13 aa, Artificial Sequence
  Synthetic polypeptide
ARQVHVPLHGSAG

SEQ ID NO: 26894 - protein, 13 aa, Artificial Sequence
  Synthetic polypeptide
ARQVHVPLHGSAG

SEQ ID NO: 26895 - protein, 13 aa, Artificial Sequence
  Synthetic polypeptide
ARQVHVPLHGSAG

SEQ ID NO: 26896 - protein, 13 aa, Artificial Sequence
  Synthetic polypeptide
ARQVHVPLHGSAG

SEQ ID NO: 26897 - protein, 291 aa, Artificial Sequence
  Synthetic polypeptide
SSEHGRYMYPSMDQLAEMLPGVLQQFGLKSIIGMGTGAGAYILTRFALNNPEMVEGLVLINVNPCAEGWMDWAASKISGWTQALPDMVVSHLFGKEEMQSNVEVVHTYRQHIVNDMNPGNLHLFINAYNSRRDLEIERPMPGTHTVTLQCPALLVVGDSSPAVDAVVECNSKLDPTKTTLLKMADCGGLPQISQPAKLAEAFKYFVQGMGYMPSASMTRLMRSRTASGSSVTSLDGTRSRSHTSEGTRSRSHTSEGTRSRSHTSEGAHLDITPNSGAAGNSAGPKSMEVSC

SEQ ID NO: 26898 - protein, 291 aa, Artificial Sequence; identical to SEQ ID NO: 26897
  Synthetic polypeptide

SEQ ID NO: 26899 - protein, 291 aa, Artificial Sequence; identical to SEQ ID NO: 26897
  Synthetic polypeptide

SEQ ID NO: 26900 - protein, 291 aa, Artificial Sequence; identical to SEQ ID NO: 26897
  Synthetic polypeptide

SEQ ID NO: 26901 - protein, 28 aa, Artificial Sequence
  Synthetic polypeptide
SSEHGRYMYPSMDQLAEMLPGVLQQFGL

SEQ ID NO: 26902 - protein, 113 aa, Artificial Sequence
  Synthetic polypeptide
SSEHGRYMYPSMDQLAEMLPGVLQQFGLKSIIGMGTGAGAYILTRFALNNPEMVEGLVLINVNPCAEGWMDWAASKPFDYQALVLDTVMCAVTSCSPSLDLVALKFLALPVPD

SEQ ID NO: 26903 - protein, 73 aa, Artificial Sequence
  Synthetic polypeptide
SSEHGRYMYPSMDQLAEMLPGVLQQFGLKSIIGMGTGAGAYILTRFALNNPEMVEGLVLINVNPCAEGWMDWA

SEQ ID NO: 26904 - protein, 63 aa, Artificial Sequence
  Synthetic polypeptide
SSEHGRYMYPSMDQLAEMLPGVLQQFGLKSIIGMGTGAGAYILTRFALNNPEMVEGLVLINVN

SEQ ID NO: 26905 - protein, 62 aa, Artificial Sequence
  Synthetic polypeptide
SSEHGRYMYPSMDQLAEMLPGVLQQFGLKSIIGMGTGAGAYILTRFALNNPEMVEGLVLINV

SEQ ID NO: 26906 - protein, 55 aa, Artificial Sequence
  Synthetic polypeptide
SSEHGRYMYPSMDQLAEMLPGVLQQFGLKSIIGMGTGAGAYILTRFALNNPEMVE

SEQ ID NO: 26907 - protein, 55 aa, Artificial Sequence; identical to SEQ ID NO: 26906
  Synthetic polypeptide

SEQ ID NO: 26908 - protein, 42 aa, Artificial Sequence
  Synthetic polypeptide
SSEHGRYMYPSMDQLAEMLPGVLQQFGLKSIIGMGTGAGAYI

SEQ ID NO: 26909 - protein, 30 aa, Artificial Sequence
  Synthetic polypeptide
SSEHGRYMYPSMDQLAEMLPGVLQQFGLKS

SEQ ID NO: 26910 - protein, 22 aa, Artificial Sequence
  Synthetic polypeptide
PLQRHFFQEALPDHLSTAGTCT

SEQ ID NO: 26911 - protein, 7 aa, Artificial Sequence
  Synthetic polypeptide
ARQVHVP

SEQ ID NO: 26912 - protein, 10 aa, Artificial Sequence
  Synthetic polypeptide
SSEHGRYMYP

SEQ ID NO: 26913 - protein, 35 aa, Artificial Sequence
  Synthetic polypeptide
YQLLGRLRLQDLLSPGVGGQPGQVTAGTCLGRCRM

SEQ ID NO: 26914 - protein, 35 aa, Artificial Sequence; identical to SEQ ID NO: 26913
  Synthetic polypeptide

SEQ ID NO: 26915 - protein, 35 aa, Artificial Sequence; identical to SEQ ID NO: 26913
  Synthetic polypeptide

SEQ ID NO: 26916 - protein, 10 aa, Artificial Sequence
  Synthetic polypeptide
AQELEASLGR

SEQ ID NO: 26917 - protein, 10 aa, Artificial Sequence
  Synthetic polypeptide
AQELEASLGR

SEQ ID NO: 26918 - protein, 10 aa, Artificial Sequence
  Synthetic polypeptide
AQELEASLGR

SEQ ID NO: 26919 - protein, 212 aa, Artificial Sequence
  Synthetic polypeptide
MVWWCMSVVSATWEAEIARSLEPRSWRPAWAGDSRDMSREMQDVDLAEVKPLVEKGETITGLLQEFDVQEQDIETLHGSVHVTLCGTPKGNRPVILTYHDIGMNHKTCYNPLFNYEDMQEITQHFAVCHVDAPGQQDGAASFPAGYMYPSMDQLAEMLPGVLQQFGLKSIIGMGTGAGAYILTRFALNNPEMVEGLVLINVNPCAEGWMDWA

SEQ ID NO: 26920 - protein, 181 aa, Artificial Sequence
  Synthetic polypeptide
MVWWCMSVVSATWEAEIARSLEPRSWRPAWAGDSRDMSREMQDVDLAEVKPLVEKGETITGLLQEFDVQEQDIETLHGSVHVTLCGTPKGNRPVILTYHDIGMNHKTCYNPLFNYEDMQEITQHFAVCHVDAPGQQDGAASFPAGYMYPSMDQLAEMLPGVLQQFGLKSIIGMGTGAGAYI

SEQ ID NO: 26921 - protein, 149 aa, Artificial Sequence
  Synthetic polypeptide
MVWWCMSVVSATWEAEIARSLEPRSWRPAWAGDSRDMSREMQDVDLAEVKPLVEKGETITGLLQEFDVQEQDIETLHGSVHVTLCGTPKGNRPVILTYHDIGMNHKTCYNPLFNYEDMQEITQHFAVCHVDAPGQQDGAASFPAGYMYP

SEQ ID NO: 26922 - protein, 299 aa, Artificial Sequence
  Synthetic polypeptide
LLLFSSWKSDTMHKPIHAEAAMFNFVGKLLGPRGNSLKRLQEETLTKMSILGKGSMRDKAKEEELRKSGEAKYFHLNDDLHVLIEVFAPPAEAYARMGHALEEIKKFLIPDYNDEIRQAQLQELTYLNGGSENADVPVVRGKPTLRTRGVPAPAITRGRGGVTARPVGVVVPRGTPTPRGVLSTRGPVSRGRGLLTPRARGVPPTGYRPPPPPPTQETYGEYDYDDGYGTAYDEQSYDSYDNSYSTPAQSGADYYDYGHGLSEETYDSYGQEEWTNSRHKAPSARTAKGVYRDQPYGRY

SEQ ID NO: 26923 - protein, 43 aa, Artificial Sequence
  Synthetic polypeptide
ALRKTSSFCFSHLGNQTPCTSLFTLRLPCSTLWGNFWVHVAIL

SEQ ID NO: 26924 - protein, 43 aa, Artificial Sequence; identical to SEQ ID NO: 26923
  Synthetic polypeptide

SEQ ID NO: 26925 - protein, 43 aa, Artificial Sequence; identical to SEQ ID NO: 26923
  Synthetic polypeptide

SEQ ID NO: 26926 - protein, 58 aa, Artificial Sequence
  Synthetic polypeptide
GCHVQLCGETFGSTWQFSEAFTRRNLDKNVHPWERFHERQGQGRRVEEKWRSEVLPSQ

SEQ ID NO: 26927 - protein, 58 aa, Artificial Sequence; identical to SEQ ID NO: 26926
  Synthetic polypeptide

SEQ ID NO: 26928 - protein, 58 aa, Artificial Sequence; identical to SEQ ID NO: 26926
  Synthetic polypeptide

SEQ ID NO: 26929 - protein, 246 aa, Artificial Sequence
  Synthetic polypeptide
LLLFSSWKSDTMHKPIHAEAAMFNFVGKLLGPRGNSLKRLQEETLTKMSILGKGSMRDKAKEEELRKSGEAKYFHLNDDLHVLIEVFAPPAEAYARMGHALEEIKKFLIPDYNDEIRQAQLQELTYLNGGSENADVPVVRGKPTLRTRGVPAPAITRGRGGVTARPVGVVVPRGTPTPRGVLSTRGPVSRGRGLLTPRARGVPPTGYRPPPPPPTQETYGEYDYDDGYGTAYDEQSYDSYDNSYST

SEQ ID NO: 26930 - protein, 140 aa, Artificial Sequence
  Synthetic polypeptide
LLLFSSWKSDTMHKPIHAEAAMFNFVGKLLGPRGNSLKRLQEETLTKMSILGKGSMRDKAKEEELRKSGEAKYFHLNDDLHVLIEVFAPPAEAYARMGHALEEIKKFLIPDYNDEIRQAQLQELTYLNGGSENADVPVVR

SEQ ID NO: 26931 - protein, 3 aa, Artificial Sequence
  Synthetic polypeptide
WWC

SEQ ID NO: 26932 - protein, 3 aa, Artificial Sequence
  Synthetic polypeptide
WWC

SEQ ID NO: 26933 - protein, 3 aa, Artificial Sequence
  Synthetic polypeptide
WWC

SEQ ID NO: 26934 - protein, 3 aa, Artificial Sequence
  Synthetic polypeptide
WWC

SEQ ID NO: 26935 - protein, 130 aa, Artificial Sequence
  Synthetic polypeptide
VAALLPGLSFLICKMEAIWTEQGGCKNPARARMDHRDLQESLALQEPLARKEAKGKMAAQDFLASWVPVGLRENQERKESQARRGSLGSLESLDSKEKGEILGSKVTKDLLVEKASLGTLESQATKATQA

SEQ ID NO: 26936 - protein, 130 aa, Artificial Sequence; identical to SEQ ID NO: 26935
  Synthetic polypeptide

SEQ ID NO: 26937 - protein, 118 aa, Artificial Sequence
  Synthetic polypeptide
FPPLLYSSHELGELLHCSQDSVFSSVKWRQSGRNKEAVRIQQGQEWITGISRRAWPFRNPWPERKQRGKWQPRTSWLPGSPWASGRTRRERSPRQGGGPWEAWRAWIQRRKGRSWDQR

SEQ ID NO: 26938 - protein, 118 aa, Artificial Sequence; identical to SEQ ID NO: 26937
  Synthetic polypeptide

SEQ ID NO: 26939 - protein, 304 aa, Artificial Sequence
  Synthetic polypeptide
ESSKGKNGSPGSPGEPGPSGTPGQKGSKGENGSPGLPGFLGPRGPPGEPGEKGVPGKEGVPGKPGEPGFKGERGDPGIKGDKGPPGGKGQPGDPGIPGHKGHTGLMGPQGLPGENGPVGPPGPPGQPGFPGLRGESPSMETLRRLIQEELGKQLETRLAYLLAQMPPAYMKSSQGRPGPPGPPGKDGLPGRAGPMGEPGRPGQGGLEGPSGPIGPKGERGAKGDPGAPGVGLRGEMGPPGIPGQPGEPGYAKDGLPGIPGPQGETGPAGHPGLPGPPGPPGQCDPSQCAYFASLAARPGNVKGP

SEQ ID NO: 26940 - protein, 304 aa, Artificial Sequence; identical to SEQ ID NO: 26939
  Synthetic polypeptide

SEQ ID NO: 26941 - protein, 150 aa, Artificial Sequence
  Synthetic polypeptide
SPGALAPSLGTGATAAAWDDDVLVDGQPCDREAVAACQVGDPVRLEVRLTNRSPRSVGPFALTVVPFQDHQNGVHNYDLHDTVSFVGSSTFYLDAVQPSGQSACLGALLFLYTGDFFLHIRFHEDSTSKELPPSWFCLPSVHVCALEAQA

SEQ ID NO: 26942 - protein, 150 aa, Artificial Sequence; identical to SEQ ID NO: 26941
  Synthetic polypeptide

SEQ ID NO: 26943 - protein, 150 aa, Artificial Sequence; identical to SEQ ID NO: 26941
  Synthetic polypeptide

SEQ ID NO: 26944 - protein, 150 aa, Artificial Sequence; identical to SEQ ID NO: 26941
  Synthetic polypeptide

SEQ ID NO: 26945 - protein, 50 aa, Artificial Sequence
  Synthetic polypeptide
FDLREPWLPRLEQEPQLPRGMMMCWWTDSHVTARLWRPARWATPCAWRCG

SEQ ID NO: 26946 - protein, 50 aa, Artificial Sequence; identical to SEQ ID NO: 26945
  Synthetic polypeptide

SEQ ID NO: 26947 - protein, 50 aa, Artificial Sequence; identical to SEQ ID NO: 26945
  Synthetic polypeptide

SEQ ID NO: 26948 - protein, 50 aa, Artificial Sequence; identical to SEQ ID NO: 26945
  Synthetic polypeptide

SEQ ID NO: 26949 - protein, 71 aa, Artificial Sequence
  Synthetic polypeptide
GGGGGGRRARHGRPGRGAWRRRADGRAAAGADPPPPPPRSSGPGRGAAAARCPSTPSGRAASVTGSPPSPS

SEQ ID NO: 26950 - protein, 71 aa, Artificial Sequence; identical to SEQ ID NO: 26949
  Synthetic polypeptide

SEQ ID NO: 26951 - protein, 71 aa, Artificial Sequence; identical to SEQ ID NO: 26949
  Synthetic polypeptide

SEQ ID NO: 26952 - protein, 62 aa, Artificial Sequence
  Synthetic polypeptide
AAAAAGAERGMGARAAGPGGGGRTGARLRAQTLLLRPPAARALVVARLPHGAPRRPPDALPL

SEQ ID NO: 26953 - protein, 62 aa, Artificial Sequence; identical to SEQ ID NO: 26952
  Synthetic polypeptide

SEQ ID NO: 26954 - protein, 62 aa, Artificial Sequence; identical to SEQ ID NO: 26952
  Synthetic polypeptide

SEQ ID NO: 26955 - protein, 723 aa, Artificial Sequence
  Synthetic polypeptide
RRRRRAQSAAWAPGPRGLAAAGGRARGCGRRPSSSAPPQLGPWSWRGCRTVPLDALRTRCLCDRLSTFAILAQLSADANMEKATLPSVTLIVGCGVSSLTLLMLVIIYVSVWRYIRSERSVILINFCLSIISSNALILIGQTQTRNKVVCTLVAAFLHFFFLSSFCWVLTEAWQSYMAVTGHLRNRLIRKRFLCLGWGLPALVVAISVGFTKAKGYSTMNYCWLSLEGGLLYAFVGPAAAVVLVNMVIGILVFNKLVSKDGITDKKLKERAGASLWSSCVVLPLLALTWMSAVLAVTDRRSALFQILFAVFDSLEGFVIVMVHCILRREVQDAVKCRVVDRQEEGNGDSGGSFQNGHAQLMTDFEKDVDLACRSVLNKDIAACRTATITGTLKRPSLPEEEKLKLAHAKGPPTNFNSLPANVSKLHLHGSPRYPGGPLPDFPNHSLTLKRDKAPKSSFVGDGDIFKKLDSELSRAQEKALDTSYVILPTATATLRPKPKEEPKYSIHIDQMPQTRLIHLSTAPEASLPARSPPSRQPPSGGPPEAPPAQPPPPPPPPPPPPQQPLPPPPNLEPAPPSLGDPGEPAAHPGPSTGPSTKNENVATLSVSSLERRKSRYAELDFEKIMHTRKRHQDMFQDLNRKLQHAAEKDKEVLGPDSKPEKQQTPNKRPWESLRKAHGTPTWVKKELEPLQPSPLELRSVEWERSGATIPLVGQDIIDLQTEV

SEQ ID NO: 26956 - protein, 723 aa, Artificial Sequence; identical to SEQ ID NO: 26955
  Synthetic polypeptide

SEQ ID NO: 26957 - protein, 298 aa, Artificial Sequence
  Synthetic polypeptide
RRRRRAQSAAWAPGPRGLAAAGGRARGCGRRPSSSAPPQLGPWSWRGCRTVPLDALRTRCLCDRLSTFAILAQLSADANMEKATLPSVTLIVGCGVSSLTLLMLVIIYVSVWRYIRSERSVILINFCLSIISSNALILIGQTQTRNKVVCTLVAAFLHFFFLSSFCWVLTEAWQSYMAVTGHLRNRLIRKRFLCLGWGLPALVVAISVGFTKAKGYSTMNYCWLSLEGGLLYAFVGPAAAVVLGLPVELLRGAAAAGADLDVGCARRHRPPLRPLPDPLRCLRLAGGLRHRHGALYPP

SEQ ID NO: 26958 - protein, 56 aa, Artificial Sequence
  Synthetic polypeptide
LKHCPAVLLLQSPGEQRGLPAGGELHPAGGAVLDRAHPRSWPPDRHQQRLQLELRG

SEQ ID NO: 26959 - protein, 107 aa, Artificial Sequence
  Synthetic polypeptide
LSTALLCYSCKAQVSNEDCLQVENCTQLGEQCWTARIRAVGLLTVISKGCSLNCVDDSQDYYVGKKNITCCDTDLCNASGAHALQPAAAILALLPALGLLLWGPGQL

SEQ ID NO: 26960 - protein, 38 aa, Artificial Sequence
  Synthetic polypeptide
LKHCPAVLLLQSPGEQRGLPAGGELHPAGGAVLDRAHP

SEQ ID NO: 26961 - protein, 47 aa, Artificial Sequence
  Synthetic polypeptide
LSTALLCYSCKAQVSNEDCLQVENCTQLGEQCWTARIREWGDDSRQA

SEQ ID NO: 26962 - protein, 44 aa, Artificial Sequence
  Synthetic polypeptide
MSEPRRRPCAATSVRSPQECRTVSPSPPAPPTKPCARPHSTPGR

SEQ ID NO: 26963 - protein, 62 aa, Artificial Sequence
  Synthetic polypeptide
CLSPGAGPALLRLSGAHRSVGLCHHRHLHHQRNHVQDHTLLPGDSVPLPGGLHGDQVLCQQV

SEQ ID NO: 26964 - protein, 108 aa, Artificial Sequence
  Synthetic polypeptide
APAPALRCYVCPEPTGVSDCVTIATCTTNETMCKTTLYSREIVYPFQGDSTVTKSCASKCKPSDVDGIGQTLPVSCCNTELCNVDGAPALNSLHCGALTLLPLLSLRL

SEQ ID NO: 26965 - protein, 47 aa, Artificial Sequence
  Synthetic polypeptide
SLSLLCLQPRACQLADVLLLLEPEEQSVLPEADHLLRPGQLLRDCVC

SEQ ID NO: 26966 - protein, 47 aa, Artificial Sequence; identical to SEQ ID NO: 26965
  Synthetic polypeptide

SEQ ID NO: 26967 - protein, 47 aa, Artificial Sequence; identical to SEQ ID NO: 26965
  Synthetic polypeptide

SEQ ID NO: 26968 - protein, 47 aa, Artificial Sequence; identical to SEQ ID NO: 26965
  Synthetic polypeptide

SEQ ID NO: 26969 - protein, 47 aa, Artificial Sequence; identical to SEQ ID NO: 26965
  Synthetic polypeptide

SEQ ID NO: 26970 - protein, 47 aa, Artificial Sequence; identical to SEQ ID NO: 26965
  Synthetic polypeptide

SEQ ID NO: 26971 - protein, 47 aa, Artificial Sequence; identical to SEQ ID NO: 26965
  Synthetic polypeptide

SEQ ID NO: 26972 - protein, 47 aa, Artificial Sequence; identical to SEQ ID NO: 26965
  Synthetic polypeptide

SEQ ID NO: 26973 - protein, 47 aa, Artificial Sequence; identical to SEQ ID NO: 26965
  Synthetic polypeptide

SEQ ID NO: 26974 - protein, 47 aa, Artificial Sequence; identical to SEQ ID NO: 26965
  Synthetic polypeptide

SEQ ID NO: 26975 - protein, 47 aa, Artificial Sequence; identical to SEQ ID NO: 26965
  Synthetic polypeptide

SEQ ID NO: 26976 - protein, 47 aa, Artificial Sequence; identical to SEQ ID NO: 26965
  Synthetic polypeptide

SEQ ID NO: 26977 - protein, 47 aa, Artificial Sequence
  Synthetic polypeptide
HCLCSAFSPGPASSLMCFSCLNQKSNLYCLKPTICSDQDNYCVTVSA

SEQ ID NO: 26978 - protein, 14 aa, Artificial Sequence
  Synthetic polypeptide
TVFALPSAQGLPAR

SEQ ID NO: 26979 - protein, 14 aa, Artificial Sequence
  Synthetic polypeptide
TVFALPSAQGLPAR

SEQ ID NO: 26980 - protein, 14 aa, Artificial Sequence
  Synthetic polypeptide
TVFALPSAQGLPAR

SEQ ID NO: 26981 - protein, 14 aa, Artificial Sequence
  Synthetic polypeptide
TVFALPSAQGLPAR

SEQ ID NO: 26982 - protein, 14 aa, Artificial Sequence
  Synthetic polypeptide
TVFALPSAQGLPAR

SEQ ID NO: 26983 - protein, 14 aa, Artificial Sequence
  Synthetic polypeptide
TVFALPSAQGLPAR

SEQ ID NO: 26984 - protein, 14 aa, Artificial Sequence
  Synthetic polypeptide
TVFALPSAQGLPAR

SEQ ID NO: 26985 - protein, 14 aa, Artificial Sequence
  Synthetic polypeptide
TVFALPSAQGLPAR

SEQ ID NO: 26986 - protein, 14 aa, Artificial Sequence
  Synthetic polypeptide
TVFALPSAQGLPAR

SEQ ID NO: 26987 - protein, 14 aa, Artificial Sequence
  Synthetic polypeptide
TVFALPSAQGLPAR

SEQ ID NO: 26988 - protein, 14 aa, Artificial Sequence
  Synthetic polypeptide
TVFALPSAQGLPAR

SEQ ID NO: 26989 - protein, 14 aa, Artificial Sequence
  Synthetic polypeptide
TVFALPSAQGLPAR

SEQ ID NO: 26990 - protein, 125 aa, Artificial Sequence
  Synthetic polypeptide
HCLCSAFSPGPASSLMCFSCLNQKSNLYCLKPTICSDQDNYCVTVSASAGIGNLVTFGHSLSKTCSPACPIPEGVNVGVASMGISCCQSFLCNFSAADGGLRASVTLLGAGLLLSLLPALLRFGP

SEQ ID NO: 26991 - protein, 125 aa, Artificial Sequence; identical to SEQ ID NO: 26990
  Synthetic polypeptide

SEQ ID NO: 26992 - protein, 125 aa, Artificial Sequence; identical to SEQ ID NO: 26990
  Synthetic polypeptide

SEQ ID NO: 26993 - protein, 125 aa, Artificial Sequence; identical to SEQ ID NO: 26990
  Synthetic polypeptide

SEQ ID NO: 26994 - protein, 125 aa, Artificial Sequence; identical to SEQ ID NO: 26990
  Synthetic polypeptide

SEQ ID NO: 26995 - protein, 125 aa, Artificial Sequence; identical to SEQ ID NO: 26990
  Synthetic polypeptide

SEQ ID NO: 26996 - protein, 125 aa, Artificial Sequence; identical to SEQ ID NO: 26990
  Synthetic polypeptide

SEQ ID NO: 26997 - protein, 67 aa, Artificial Sequence
  Synthetic polypeptide
HCLCSAFSPGPASSLMCFSCLNQKSNLYCLKPTICSDQDNYCVTVSASAGIGECQASDRAFLPWPSP

SEQ ID NO: 26998 - protein, 60 aa, Artificial Sequence
  Synthetic polypeptide
HCLCSAFSPGPASSLMCFSCLNQKSNLYCLKPTICSDQDNYCVTVSASAGIASFPMQGIS

SEQ ID NO: 26999 - protein, 60 aa, Artificial Sequence; identical to SEQ ID NO: 26998
  Synthetic polypeptide

SEQ ID NO: 27000 - protein, 60 aa, Artificial Sequence
  Synthetic polypeptide
HCLCSAFSPGPASSLMCFSCLNQKSNLYCLKPTICSDQDNYCVTVSASAGIGGFAGGTDS

SEQ ID NO: 27001 - protein, 57 aa, Artificial Sequence
  Synthetic polypeptide
SQHFGRPRRVDSKVKRSRPAWPTCSCSPDGSQGEQTRQTRHPRGADGHGAWGRPLSG

SEQ ID NO: 27002 - protein, 63 aa, Artificial Sequence
  Synthetic polypeptide
PGAVTHACNPSTLEGQGGWIARSRDRDQPGQHAPARRTAPRESRRARRATLGAPTVTEHGVGL

SEQ ID NO: 27003 - protein, 522 aa, Artificial Sequence
  Synthetic polypeptide
QGQEIETSLANMLLLAGRLPGRADAPDAPPSGRRRSRSMGSAFERVVRRVVQELDHGGEFIPVTSLQSSTGFQPYCLVVRKPSSSWFWKPRYKCVNLSIKDILEPDAAEPDVQRGRSFHFYDAMDGQIQGSVELAAPGQAKIAGGAAVSDSSSTSMNVYSLSVDPNTWQTLLHERHLRQPEHKVLQQLRSRGDNVYVVTEVLQTQKEVEVTRTHKREGSGRFSLPGATCLQGEGQGHLSQKKTVTIPSGSTLAFRVAQLVIDSDLDVLLFPDKKQRTFQPPATGHKRSTSEGAWPQLPSGLSMMRCLHNFLTDGVPAEGAFTEDFQGLRAEVETISKELELLDRELCQLLLEGLEGVLRDQLALRALEEALEQGQSLGPVEPLDGPAGAVLECLVLSSGMLVPELAIPVVYLLGALTMLSETQHKLLAEALESQTLLGPLELVGSLLEQSAPWQERSTMSLPPGLLGNSWGEGAPAWVLLDECGLELGEDTPHVCWEPQAQGRMCALYASLALLSGLSQEPH

SEQ ID NO: 27004 - protein, 27 aa, Artificial Sequence
  Synthetic polypeptide
SQLLGRLRQENRLNPGGGRCEKWLQTS

SEQ ID NO: 27005 - protein, 27 aa, Artificial Sequence
  Synthetic polypeptide
SQLLGRLRQENRLNPGGGRCEKWLQTS

SEQ ID NO: 27006 - protein, 27 aa, Artificial Sequence
  Synthetic polypeptide
SQLLGRLRQENRLNPGGGRCEKWLQTS

SEQ ID NO: 27007 - protein, 27 aa, Artificial Sequence
  Synthetic polypeptide
SQLLGRLRQENRLNPGGGRCEKWLQTS

SEQ ID NO: 27008 - protein, 27 aa, Artificial Sequence
  Synthetic polypeptide
SQLLGRLRQENRLNPGGGRCEKWLQTS

SEQ ID NO: 27009 - protein, 16 aa, Artificial Sequence
  Synthetic polypeptide
TQEADVAKNGYKLPST

SEQ ID NO: 27010 - protein, 16 aa, Artificial Sequence
  Synthetic polypeptide
TQEADVAKNGYKLPST

SEQ ID NO: 27011 - protein, 16 aa, Artificial Sequence
  Synthetic polypeptide
TQEADVAKNGYKLPST

SEQ ID NO: 27012 - protein, 16 aa, Artificial Sequence
  Synthetic polypeptide
TQEADVAKNGYKLPST

SEQ ID NO: 27013 - protein, 16 aa, Artificial Sequence
  Synthetic polypeptide
TQEADVAKNGYKLPST

SEQ ID NO: 27014 - protein, 334 aa, Artificial Sequence
  Synthetic polypeptide
DQEFKTSLANMVKPCLLKIQKISQAQWCALVVPVTREAEAGKSLEPRRRTLRKMATNFLAHEKIWFDKFKYDDAERRFYEQMNGPVAGASRQENGASVILRDIARARENIQKSLAGSSGPGASSGTSGDHGELVVRIASLEVENQSLRGVVQELQQAISKLEARLNVLEKSSPGHRATAPQTQHVSPMRQVEPPAKKPATPAEDDEDDDIDLFGSDNEEEDKEAAQLREERLRQYAEKKAKKPALVAKSSILLDVKPWDDETDMAQLEACVRSIQLDGLVWGASKLVPVGYGIRKLQIQCVVEDDKVGTDLLEEEITKFEEHVQSVDIAAFNKI

SEQ ID NO: 27015 - protein, 334 aa, Artificial Sequence; identical to SEQ ID NO: 27014
  Synthetic polypeptide

SEQ ID NO: 27016 - protein, 334 aa, Artificial Sequence; identical to SEQ ID NO: 27014
  Synthetic polypeptide

SEQ ID NO: 27017 - protein, 183 aa, Artificial Sequence
  Synthetic polypeptide
DQEFKTSLANMVKPCLLKIQKISQAQWCALVVPVTREAEAGKSLEPRRRTLRKMATNFLAHEKIWFDKFKYDDAERRFYEQMNGPVAGASRQENGASVILRDIARARENIQKSLAGSSGPGASSGTSGDHGELVVRIASLEVENQSLRGVVQELQQAISKLEARLNVLEKSSPGHRATAPQTQ

SEQ ID NO: 27018 - protein, 174 aa, Artificial Sequence
  Synthetic polypeptide
DQEFKTSLANMVKPCLLKIQKISQAQWCALVVPVTREAEAGKSLEPRRRTLRKMATNFLAHEKIWFDKFKYDDAERRFYEQMNGPVAGASRQENGASVILRDIARARENIQKSLAGSSGPGASSGTSGDHGELVVRIASLEVENQSLRGVVQELQQAISKLEARLNVLEKSSPG

SEQ ID NO: 27019 - protein, 99 aa, Artificial Sequence
  Synthetic polypeptide
LTMSLRSLPCETWQYRMPPRAVQEKWKLSTYWPVHQQTGTYVTFKLWVAGPRTPTRRCCRAACSSSLPPSLMCCQLSWQRWLLWSPLNTSWCPWLLGCL

SEQ ID NO: 27020 - protein, 99 aa, Artificial Sequence; identical to SEQ ID NO: 27019
  Synthetic polypeptide

SEQ ID NO: 27021 - protein, 83 aa, Artificial Sequence
  Synthetic polypeptide
VSGVFPVKPGSTACLPELYRKSGSSAHTGQCTNRQEPMSLSSSGLPDHALQPGGAAELPARHLCHQASCAASCPGRGGSCGHH

SEQ ID NO: 27022 - protein, 83 aa, Artificial Sequence; identical to SEQ ID NO: 27021
  Synthetic polypeptide

SEQ ID NO: 27023 - protein, 256 aa, Artificial Sequence
  Synthetic polypeptide
NLAVPHASQSCTGKVEAQHILASAPTDRNLCHFQALGCRTTHSNQEVLQSCLLVIFATKPHVLPAVLAEVAPVVTTEHILVSVAAGVSLSTLEELLPPNTRVLRVLPNLPCVVQEGAIVMARGRHVGSSETKLLQHLLEACGRCEEVPEAYVDIHTGLSGSGVAFVCAFSEALAEGAVKMGMPSSLAHRIAAQTLLGTAKMLLHEGQHPAQLRSDVCTPGGTTIYGLHALEQGGLRAATMSAVEAATCRAKELSRK

SEQ ID NO: 27024 - protein, 236 aa, Artificial Sequence
  Synthetic polypeptide
NLAVPHASQSCTGKVEAQHILASAPTDRNLCHFQALGCRTTHSNQEVLQSCLLVIFATKPHVLPAVLAEVAPVVTTEHILVSVAAGVSLSTLEEEGAIVMARGRHVGSSETKLLQHLLEACGRCEEVPEAYVDIHTGLSGSGVAFVCAFSEALAEGAVKMGMPSSLAHRIAAQTLLGTAKMLLHEGQHPAQLRSDVCTPGGTTIYGLHALEQGGLRAATMSAVEAATCRAKELSRK

SEQ ID NO: 27025 - protein, 41 aa, Artificial Sequence
  Synthetic polypeptide
LAPSPFSSTPTSLLPRRPYYPRDPGLPGSSPAGQGPSELSI

SEQ ID NO: 27026 - protein, 41 aa, Artificial Sequence; identical to SEQ ID NO: 27025
  Synthetic polypeptide

SEQ ID NO: 27027 - protein, 41 aa, Artificial Sequence; identical to SEQ ID NO: 27025
  Synthetic polypeptide

SEQ ID NO: 27028 - protein, 210 aa, Artificial Sequence
  Synthetic polypeptide
SLPLLSALLRRHSFPDDLIIHAIRGSRARALPDRALVNCQYSSATFSTGERKRRPHGDRKSCEMGLQLRQTFEAAILTQLHPRSQIDIYVQVLQADGGTYAACVNAATLAVLDAGIPMRDFVCACSAGFVDGTALADLSHVEEAAGGPQLALALLPASGQIALLEMDARLHEDHLERVLEAAAQAARDVHTLLDRVVRQHVREASILLGD

SEQ ID NO: 27029 - protein, 35 aa, Artificial Sequence
  Synthetic polypeptide
RSLSFQLYSDVTPSQTTLLSTRSGAPGLEPCRTGP

SEQ ID NO: 27030 - protein, 35 aa, Artificial Sequence; identical to SEQ ID NO: 27029
  Synthetic polypeptide

SEQ ID NO: 27031 - protein, 35 aa, Artificial Sequence; identical to SEQ ID NO: 27029
  Synthetic polypeptide

SEQ ID NO: 27032 - protein, 121 aa, Artificial Sequence
  Synthetic polypeptide
SLPLLSALLRRHSFPDDLIIHAIRGSRARALPDRALVNCQYSSATFSTGATGRWWDLCSLCECSHAGSAGCRDTHERLCVCVLSWLRGRHSPGGPQPCGGSSWWPPAGPGPAASLRTDCAA

SEQ ID NO: 27033 - protein, 203 aa, Artificial Sequence
  Synthetic polypeptide
SLPLLSALLRRHSFPDDLIIHAIRGSRARALPDRALVNCQYSSATFSTGERKRRPHGDRKSCEMGLQLRQTFEAAILTQLHPRSQIDIYVQVLQADGGTYAACVNAATLAVLDAGIPMRDFVCACSAGFVDGTALADLSHVEEAAGGPQLALALLPASGQIALLEMDARLHEDHLERVLEAAAQAARDVHTLLDRVVRQHVRE

SEQ ID NO: 27034 - protein, 227 aa, Artificial Sequence
  Synthetic polypeptide
AFSPLFPRWNISFLKKGTLHKTIWFHYCASSAVTAWPAKIRGSRARALPDRALVNCQYSSATFSTGERKRRPHGDRKSCEMGLQLRQTFEAAILTQLHPRSQIDIYVQVLQADGGTYAACVNAATLAVLDAGIPMRDFVCACSAGFVDGTALADLSHVEEAAGGPQLALALLPASGQIALLEMDARLHEDHLERVLEAAAQAARDVHTLLDRVVRQHVREASILLGD

SEQ ID NO: 27035 - protein, 19 aa, Artificial Sequence
  Synthetic polypeptide
LPGQRRSGAPGLEPCRTGP

SEQ ID NO: 27036 - protein, 19 aa, Artificial Sequence
  Synthetic polypeptide
LPGQRRSGAPGLEPCRTGP

SEQ ID NO: 27037 - protein, 19 aa, Artificial Sequence
  Synthetic polypeptide
LPGQRRSGAPGLEPCRTGP

SEQ ID NO: 27038 - protein, 37 aa, Artificial Sequence
  Synthetic polypeptide
NYLVSLLCFQRCNCLASEDPGLPGSSPAGQGPSELSI

SEQ ID NO: 27039 - protein, 37 aa, Artificial Sequence; identical to SEQ ID NO: 27038
  Synthetic polypeptide

SEQ ID NO: 27040 - protein, 37 aa, Artificial Sequence; identical to SEQ ID NO: 27038
  Synthetic polypeptide

SEQ ID NO: 27041 - protein, 138 aa, Artificial Sequence
  Synthetic polypeptide
AFSPLFPRWNISFLKKGTLHKTIWFHYCASSAVTAWPAKIRGSRARALPDRALVNCQYSSATFSTGATGRWWDLCSLCECSHAGSAGCRDTHERLCVCVLSWLRGRHSPGGPQPCGGSSWWPPAGPGPAASLRTDCAA

SEQ ID NO: 27042 - protein, 220 aa, Artificial Sequence
  Synthetic polypeptide
AFSPLFPRWNISFLKKGTLHKTIWFHYCASSAVTAWPAKIRGSRARALPDRALVNCQYSSATFSTGERKRRPHGDRKSCEMGLQLRQTFEAAILTQLHPRSQIDIYVQVLQADGGTYAACVNAATLAVLDAGIPMRDFVCACSAGFVDGTALADLSHVEEAAGGPQLALALLPASGQIALLEMDARLHEDHLERVLEAAAQAARDVHTLLDRVVRQHVRE

SEQ ID NO: 27043 - protein, 83 aa, Artificial Sequence
  Synthetic polypeptide
GRVGAGTASTCSTRASLPRRCCPSTSSTTTWPASCGSSTCMASGKWSTSSRAAWSSQRETTRSSSTHASCVARSSSLRTSRGK

SEQ ID NO: 27044 - protein, 76 aa, Artificial Sequence
  Synthetic polypeptide
AEWEREQLPRVRPGPVCQGGAAQVLQAQQHGQLRAAAQHVWLPESGPHRAGRPGQARERRHGVPAPMLPAWPGAAP

SEQ ID NO: 27045 - protein, 493 aa, Artificial Sequence
  Synthetic polypeptide
PSGSGNSFHVFDQGQFAKEVLPKYFKHNNMASFVRQLNMYGFRKVVHIEQGGLVKPERDDTEFQHPCFLRGQEQLLENIKRKVTSVSTLKSEDIKIRQDSVTKLLTDVQLMKGKQECMDSKLLAMKHENEALWREVASLRQKHAQQQKVVNKLIQFLISLVQSNRILGVKRKIPLMLNDSGSAHSMPKYSRQFSLEHVHGSGPYSAPSPAYSSSSLYAPDAVASSGPIISDITELAPASPMASPGGSIDERPLSSSPLVRVKEEPPSPPQSPRVEEASPGRPSSVDTLLSPTALIDSILRESEPAPASVTALTDARGHTDTEGRPPSPPPTSTPEKCLSVACLDKNELSDHLDAMDSNLDNLQTMLSSHGFSVDTSALLDLFSPSVTVPDMSLPDLDSSLASIQELLSPQEPPRPPEAENSSPDSGKQLVHYTAQPLFLLDPGSVDTGSNDLPVLFELGEGSYFSEGDGFAEDPTISLLTGSEPPKAKDPTVS

SEQ ID NO: 27046 - protein, 314 aa, Artificial Sequence
  Synthetic polypeptide
GLLSHASCIACRNNLLAEKVEQLMEWSSRRSIFRMNGDKFRKFIKAPPRNYSMIVMFTALQPQRQCSVCRQANEEYQILANSWRYSSAFCNKLFFSMVDYDEGTDVFQQLNMNSAPTFMHFPPKGRPKRADTFDLQRIGFAAEQLAKWIADRTDVHIRVFRPPNYSGTIALALLVSLVGGLLYLRRNNLEFIYNKTGWAMVSLCIVFAMTSGQMWNHIRGPPYAHKNPHNGQVSYIHGSSQAQFVAESHIILVLNAAITMGMVLLNEAATSKGDVGKRRIICLVGLGLVVFFFSFLLSIFRSKYHGYPYSFLIK

SEQ ID NO: 27047 - protein, 6 aa, Artificial Sequence
  Synthetic polypeptide
PAEIIF

SEQ ID NO: 27048 - protein, 6 aa, Artificial Sequence
  Synthetic polypeptide
PAEIIF

SEQ ID NO: 27049 - protein, 6 aa, Artificial Sequence
  Synthetic polypeptide
PAEIIF

SEQ ID NO: 27050 - protein, 6 aa, Artificial Sequence
  Synthetic polypeptide
PAEIIF

SEQ ID NO: 27051 - protein, 6 aa, Artificial Sequence
  Synthetic polypeptide
PAEIIF

SEQ ID NO: 27052 - protein, 6 aa, Artificial Sequence
  Synthetic polypeptide
PAEIIF

SEQ ID NO: 27053 - protein, 6 aa, Artificial Sequence
  Synthetic polypeptide
PAEIIF

SEQ ID NO: 27054 - protein, 243 aa, Artificial Sequence
  Synthetic polypeptide
GLLSHASCIACRNNLLAEKVEQLMEWSSRRSIFRMNGDKFRKFIKAPPRNYSMIVMFTALQPQRQCSVCRQANEEYQILANSWRYSSAFCNKLFFSMVDYDEGTDVFQQLNMNSAPTFMHFPPKGRPKRADTFDLQRIGFAAEQLAKWIADRTDVHIRVFRPPNYSGTIALALLVSLVGGLLYLRRNNLEFIYNKTGWAMVSLCIVFAMTSGQMWNHIRGPPYAHKNPHNGQVMPLSPWGWFF

SEQ ID NO: 27055 - protein, 243 aa, Artificial Sequence; identical to SEQ ID NO: 27054
  Synthetic polypeptide

SEQ ID NO: 27056 - protein, 281 aa, Artificial Sequence
  Synthetic polypeptide
GLLSHASCIACRNNLLAEKVEQLMEWSSRRSIFRMNGDKFRKFIKAPPRNYSMIVMFTALQPQRQCSVCRQANEEYQILANSWRYSSAFCNKLFFSMVDYDEGTDVFQQLNMNSAPTFMHFPPKGRPKRADTFDLQRIGFAAEQLAKWIADRTDVHIRVFRPPNYSGTIALALLVSLVGGLLYLRRNNLEFIYNKTGWAMVSLCIVFAMTSGQMWNHIRGPPYAHKNPHNGQVSYIHGSSQAQFVAESHIILVLNAAITMGMVLLNEAATSKGDVGKRRTF

SEQ ID NO: 27057 - protein, 256 aa, Artificial Sequence
  Synthetic polypeptide
GLLSHASCIACRNNLLAEKVEQLMEWSSRRSIFRMNGDKFRKFIKAPPRNYSMIVMFTALQPQRQCSVCRQANEEYQILANSWRYSSAFCNKLFFSMVDYDEGTDVFQQLNMNSAPTFMHFPPKGRPKRADTFDLQRIGFAAEQLAKWIADRTDVHIRVFRPPNYSGTIALALLVSLVGGLLYLRRNNLEFIYNKTGWAMVSLCIVFAMTSGQMWNHIRGPPYAHKNPHNGQVSYIHGSSQAQFVAESHIILVLTS

SEQ ID NO: 27058 - protein, 315 aa, Artificial Sequence
  Synthetic polypeptide
GLLSHASCIACRNNLLAEKVEQLMEWSSRRSIFRMNGDKFRKFIKAPPRNYSMIVMFTALQPQRQCSVCRQANEEYQILANSWRYSSAFCNKLFFSMVDYDEGTDVFQQLNMNSAPTFMHFPPKGRPKRADTFDLQRIGFAAEQLAKWIADRTDVHIRVFRPPNYSGTIALALLVSLVGGLLYLRRNNLEFIYNKTGWAMVSLCIVFAMTSGQMWNHIRGPPYAHKNPHNGQVSYIHGSSQAQFVAESHIILVLNAAITMGMVLLNEAATSKGDVGKRRIICLVGLGLVVFFFSFLLSIFRSKYHGYPYSDLDFE

SEQ ID NO: 27059 - protein, 315 aa, Artificial Sequence; identical to SEQ ID NO: 27058
  Synthetic polypeptide

SEQ ID NO: 27060 - protein, 86 aa, Artificial Sequence
  Synthetic polypeptide
GQAQWLTPVIPAVWKAEAGGLLELRSWRPARATQCHSANLNGVYYSGPYTAKTDNGIVWYTWHGWWYSLKSVVMKIRPNDFIPNVI

SEQ ID NO: 27061 - protein, 86 aa, Artificial Sequence; identical to SEQ ID NO: 27060
  Synthetic polypeptide

SEQ ID NO: 27062 - protein, 86 aa, Artificial Sequence; identical to SEQ ID NO: 27060
  Synthetic polypeptide

SEQ ID NO: 27063 - protein, 86 aa, Artificial Sequence; identical to SEQ ID NO: 27060
  Synthetic polypeptide

SEQ ID NO: 27064 - protein, 86 aa, Artificial Sequence; identical to SEQ ID NO: 27060
  Synthetic polypeptide

SEQ ID NO: 27065 - protein, 86 aa, Artificial Sequence; identical to SEQ ID NO: 27060
  Synthetic polypeptide

SEQ ID NO: 27066 - protein, 86 aa, Artificial Sequence; identical to SEQ ID NO: 27060
  Synthetic polypeptide

SEQ ID NO: 27067 - protein, 39 aa, Artificial Sequence
  Synthetic polypeptide
ARRSGSHLLSQQFGRLRQEDCLSSGVGDQPGQHSVTLQT

SEQ ID NO: 27068 - protein, 39 aa, Artificial Sequence; identical to SEQ ID NO: 27067
  Synthetic polypeptide

SEQ ID NO: 27069 - protein, 39 aa, Artificial Sequence; identical to SEQ ID NO: 27067
  Synthetic polypeptide

SEQ ID NO: 27070 - protein, 39 aa, Artificial Sequence; identical to SEQ ID NO: 27067
  Synthetic polypeptide

SEQ ID NO: 27071 - protein, 39 aa, Artificial Sequence; identical to SEQ ID NO: 27067
  Synthetic polypeptide

SEQ ID NO: 27072 - protein, 39 aa, Artificial Sequence; identical to SEQ ID NO: 27067
  Synthetic polypeptide

SEQ ID NO: 27073 - protein, 39 aa, Artificial Sequence; identical to SEQ ID NO: 27067
  Synthetic polypeptide

SEQ ID NO: 27074 - protein, 28 aa, Artificial Sequence
  Synthetic polypeptide
AQELETSQGNTVSLCKPEWCILQRPLHG

SEQ ID NO: 27075 - protein, 28 aa, Artificial Sequence
  Synthetic polypeptide
AQELETSQGNTVSLCKPEWCILQRPLHG

SEQ ID NO: 27076 - protein, 28 aa, Artificial Sequence
  Synthetic polypeptide
AQELETSQGNTVSLCKPEWCILQRPLHG

SEQ ID NO: 27077 - protein, 28 aa, Artificial Sequence
  Synthetic polypeptide
AQELETSQGNTVSLCKPEWCILQRPLHG

SEQ ID NO: 27078 - protein, 28 aa, Artificial Sequence
  Synthetic polypeptide
AQELETSQGNTVSLCKPEWCILQRPLHG

SEQ ID NO: 27079 - protein, 28 aa, Artificial Sequence
  Synthetic polypeptide
AQELETSQGNTVSLCKPEWCILQRPLHG

SEQ ID NO: 27080 - protein, 28 aa, Artificial Sequence
  Synthetic polypeptide
AQELETSQGNTVSLCKPEWCILQRPLHG

SEQ ID NO: 27081 - protein, 25 aa, Artificial Sequence
  Synthetic polypeptide
LQENKLRAPTDSTLWIHWQNLLAEN

SEQ ID NO: 27082 - protein, 25 aa, Artificial Sequence
  Synthetic polypeptide
LQENKLRAPTDSTLWIHWQNLLAEN

SEQ ID NO: 27083 - protein, 25 aa, Artificial Sequence
  Synthetic polypeptide
LQENKLRAPTDSTLWIHWQNLLAEN

SEQ ID NO: 27084 - protein, 25 aa, Artificial Sequence
  Synthetic polypeptide
LQENKLRAPTDSTLWIHWQNLLAEN

SEQ ID NO: 27085 - protein, 25 aa, Artificial Sequence
  Synthetic polypeptide
LQENKLRAPTDSTLWIHWQNLLAEN

SEQ ID NO: 27086 - protein, 51 aa, Artificial Sequence
  Synthetic polypeptide
PVTVSHHPHMRPSSCRKISSGLPLILHYGFTGKICWQKTERLWRRSSCRDI

SEQ ID NO: 27087 - protein, 51 aa, Artificial Sequence; identical to SEQ ID NO: 27086
  Synthetic polypeptide

SEQ ID NO: 27088 - protein, 51 aa, Artificial Sequence; identical to SEQ ID NO: 27086
  Synthetic polypeptide

SEQ ID NO: 27089 - protein, 51 aa, Artificial Sequence; identical to SEQ ID NO: 27086
  Synthetic polypeptide

SEQ ID NO: 27090 - protein, 51 aa, Artificial Sequence; identical to SEQ ID NO: 27086
  Synthetic polypeptide

SEQ ID NO: 27091 - protein, 374 aa, Artificial Sequence
  Synthetic polypeptide
FYIMDSLAKFAGRKLKDCGEDLLVEISEVLFNELAFFKLMQDLDNNSITVKQRCKRKIEATGVIQSCAKEAKRILEDHGSPAGEIDDEDKDKDETETVKQTQTSEVYDGPKNVRSDISDQEEDEESEGCPVSINLSKAETQALTNYGSGEDENEDEEMEEFEEGPVDVQTSLQANTEATEENEHDEQVLQRDFKKTAESKNVPLEREATSKNDQNNCPVKPCYLNILEDEQPLNSAAHKESPPTVDSTQQPNPLPLRLPEMEPLVPRVKEVKSAQETPESSLAGSPDTESPVLVNDYEAESGNISQKSDEEDFVKVEDLPLKLTIYSEADLRKKMVEEEQKNHLSGEICEMQTEELAGNSETLKEPETVGAQSI

SEQ ID NO: 27092 - protein, 374 aa, Artificial Sequence; identical to SEQ ID NO: 27091
  Synthetic polypeptide

SEQ ID NO: 27093 - protein, 374 aa, Artificial Sequence; identical to SEQ ID NO: 27091
  Synthetic polypeptide

SEQ ID NO: 27094 - protein, 374 aa, Artificial Sequence; identical to SEQ ID NO: 27091
  Synthetic polypeptide

SEQ ID NO: 27095 - protein, 264 aa, Artificial Sequence
  Synthetic polypeptide
FYIMDSLAKFAGRKLKDCGEDLLVEISEVLFNELAFFKLMQDLDNNSITVKQRCKRKIEATGVIQSCAKEAKRILEDHGSPAGEIDDEDKDKDETETVKQTQTSEVYDGPKNVRSDISDQEEDEESEGCPVSINLSKAETQALTNYGSGEDENEDEEMEEFEEGPVDVQTSLQANTEATEENEHDEQEAESGNISQKSDEEDFVKVEDLPLKLTIYSEADLRKKMVEEEQKNHLSGEICEMQTEELAGNSETLKEPETVGAQSI

SEQ ID NO: 27096 - protein, 108 aa, Artificial Sequence
  Synthetic polypeptide
KRPPVASGSIEEPGKRCPLCSLLSRCIWRSWEAESGNISQKSDEEDFVKVEDLPLKLTIYSEADLRKKMVEEEQKNHLSGEICEMQTEELAGNSETLKEPETVGAQSI

SEQ ID NO: 27097 - protein, 108 aa, Artificial Sequence; identical to SEQ ID NO: 27096
  Synthetic polypeptide

SEQ ID NO: 27098 - protein, 108 aa, Artificial Sequence; identical to SEQ ID NO: 27096
  Synthetic polypeptide

SEQ ID NO: 27099 - protein, 108 aa, Artificial Sequence; identical to SEQ ID NO: 27096
  Synthetic polypeptide

SEQ ID NO: 27100 - protein, 108 aa, Artificial Sequence; identical to SEQ ID NO: 27096
  Synthetic polypeptide

SEQ ID NO: 27101 - protein, 44 aa, Artificial Sequence
  Synthetic polypeptide
GVRVGFERDPLWPLEASRNQAKGVHCAHCFLAASGGPGKQNLVI

SEQ ID NO: 27102 - protein, 44 aa, Artificial Sequence; identical to SEQ ID NO: 27101
  Synthetic polypeptide

SEQ ID NO: 27103 - protein, 44 aa, Artificial Sequence; identical to SEQ ID NO: 27101
  Synthetic polypeptide

SEQ ID NO: 27104 - protein, 44 aa, Artificial Sequence; identical to SEQ ID NO: 27101
  Synthetic polypeptide

SEQ ID NO: 27105 - protein, 44 aa, Artificial Sequence; identical to SEQ ID NO: 27101
  Synthetic polypeptide

SEQ ID NO: 27106 - protein, 38 aa, Artificial Sequence
  Synthetic polypeptide
DLKETPCGLWKHRGTRQKVSIVLTAFSLHLEVLGSRIW

SEQ ID NO: 27107 - protein, 38 aa, Artificial Sequence; identical to SEQ ID NO: 27106
  Synthetic polypeptide

SEQ ID NO: 27108 - protein, 38 aa, Artificial Sequence; identical to SEQ ID NO: 27106
  Synthetic polypeptide

SEQ ID NO: 27109 - protein, 38 aa, Artificial Sequence; identical to SEQ ID NO: 27106
  Synthetic polypeptide

SEQ ID NO: 27110 - protein, 38 aa, Artificial Sequence; identical to SEQ ID NO: 27106
  Synthetic polypeptide

SEQ ID NO: 27111 - protein, 33 aa, Artificial Sequence
  Synthetic polypeptide
EKGLYEFLQQVYQSLQLFLIRDLPNRKGQRDIV

SEQ ID NO: 27112 - protein, 33 aa, Artificial Sequence; identical to SEQ ID NO: 27111
  Synthetic polypeptide

SEQ ID NO: 27113 - protein, 33 aa, Artificial Sequence; identical to SEQ ID NO: 27111
  Synthetic polypeptide

SEQ ID NO: 27114 - protein, 33 aa, Artificial Sequence; identical to SEQ ID NO: 27111
  Synthetic polypeptide

SEQ ID NO: 27115 - protein, 33 aa, Artificial Sequence; identical to SEQ ID NO: 27111
  Synthetic polypeptide

SEQ ID NO: 27116 - protein, 33 aa, Artificial Sequence; identical to SEQ ID NO: 27111
  Synthetic polypeptide

SEQ ID NO: 27117 - protein, 33 aa, Artificial Sequence; identical to SEQ ID NO: 27111
  Synthetic polypeptide

SEQ ID NO: 27118 - protein, 344 aa, Artificial Sequence
  Synthetic polypeptide
RNKKRGCMNFFSKSTSRCNYFLSGIYRTERDKGTLYELTFKGDHKHEFKRLILFRPFGPIMKVKNEKLNMANTLINVIVPLAKRVDKFRQFMQNFREMCIEQDGRVHLTVVYFGKEEINEVKGILENTSKAANFRNFTFIQLNGEFSRGKGLDVGARFWKGSNVLLFFCDVDIYFTSEFLNTCRLNTQPGKKVFYPVLFSQYNPGIIYGHHDAVPPLEQQLVIKKETGFWRDFGFGMTCQYRSDFINIGGFDLDIKGWGGEDVHLYRKYLHSNLIVVRTPVRGLFHLWHEKRCMDELTPEQYKMCMQSKAMNEASHGQLGMLVFRHEIEAHLRKQKQKTSSKKT

SEQ ID NO: 27119 - protein, 344 aa, Artificial Sequence; identical to SEQ ID NO: 27118
  Synthetic polypeptide

SEQ ID NO: 27120 - protein, 344 aa, Artificial Sequence; identical to SEQ ID NO: 27118
  Synthetic polypeptide

SEQ ID NO: 27121 - protein, 344 aa, Artificial Sequence; identical to SEQ ID NO: 27118
  Synthetic polypeptide

SEQ ID NO: 27122 - protein, 344 aa, Artificial Sequence; identical to SEQ ID NO: 27118
  Synthetic polypeptide

SEQ ID NO: 27123 - protein, 52 aa, Artificial Sequence
  Synthetic polypeptide
ISSASLPVAATISYQGSTEQKGTKGHCMSSPSKGTTNTNSNGSSYFDHSAPS

SEQ ID NO: 27124 - protein, 52 aa, Artificial Sequence; identical to SEQ ID NO: 27123
  Synthetic polypeptide

SEQ ID NO: 27125 - protein, 52 aa, Artificial Sequence; identical to SEQ ID NO: 27123
  Synthetic polypeptide

SEQ ID NO: 27126 - protein, 52 aa, Artificial Sequence; identical to SEQ ID NO: 27123
  Synthetic polypeptide

SEQ ID NO: 27127 - protein, 52 aa, Artificial Sequence; identical to SEQ ID NO: 27123
  Synthetic polypeptide

SEQ ID NO: 27128 - protein, 52 aa, Artificial Sequence; identical to SEQ ID NO: 27123
  Synthetic polypeptide

SEQ ID NO: 27129 - protein, 52 aa, Artificial Sequence; identical to SEQ ID NO: 27123
  Synthetic polypeptide

SEQ ID NO: 27130 - protein, 109 aa, Artificial Sequence
  Synthetic polypeptide
RNKKRGCMNFFSKSTSRCNYFLSGIYRTERDKGTLYELTFKGDHKHEFKRLILFRPFGPIMKVKNEKLNMANTLINVIVPLAKRVDKFRQFMQNFRPADEVFRCVPLSP

SEQ ID NO: 27131 - protein, 109 aa, Artificial Sequence; identical to SEQ ID NO: 27130
  Synthetic polypeptide

SEQ ID NO: 27132 - protein, 44 aa, Artificial Sequence
  Synthetic polypeptide
LPDGLHEGSTEQKGTKGHCMSSPSKGTTNTNSNGSSYFDHSAPS

SEQ ID NO: 27133 - protein, 44 aa, Artificial Sequence; identical to SEQ ID NO: 27132
  Synthetic polypeptide

SEQ ID NO: 27134 - protein, 44 aa, Artificial Sequence; identical to SEQ ID NO: 27132
  Synthetic polypeptide

SEQ ID NO: 27135 - protein, 44 aa, Artificial Sequence; identical to SEQ ID NO: 27132
  Synthetic polypeptide

SEQ ID NO: 27136 - protein, 44 aa, Artificial Sequence; identical to SEQ ID NO: 27132
  Synthetic polypeptide

SEQ ID NO: 27137 - protein, 44 aa, Artificial Sequence; identical to SEQ ID NO: 27132
  Synthetic polypeptide

SEQ ID NO: 27138 - protein, 44 aa, Artificial Sequence; identical to SEQ ID NO: 27132
  Synthetic polypeptide

SEQ ID NO: 27139 - protein, 25 aa, Artificial Sequence
  Synthetic polypeptide
FLLIVDCLMVFMRDLPNRKGQRDIV

SEQ ID NO: 27140 - protein, 25 aa, Artificial Sequence
  Synthetic polypeptide
FLLIVDCLMVFMRDLPNRKGQRDIV

SEQ ID NO: 27141 - protein, 25 aa, Artificial Sequence
  Synthetic polypeptide
FLLIVDCLMVFMRDLPNRKGQRDIV

SEQ ID NO: 27142 - protein, 25 aa, Artificial Sequence
  Synthetic polypeptide
FLLIVDCLMVFMRDLPNRKGQRDIV

SEQ ID NO: 27143 - protein, 25 aa, Artificial Sequence
  Synthetic polypeptide
FLLIVDCLMVFMRDLPNRKGQRDIV

SEQ ID NO: 27144 - protein, 25 aa, Artificial Sequence
  Synthetic polypeptide
FLLIVDCLMVFMRDLPNRKGQRDIV

SEQ ID NO: 27145 - protein, 25 aa, Artificial Sequence
  Synthetic polypeptide
FLLIVDCLMVFMRDLPNRKGQRDIV

SEQ ID NO: 27146 - protein, 3 aa, Artificial Sequence
  Synthetic polypeptide
LDV

SEQ ID NO: 27147 - protein, 3 aa, Artificial Sequence
  Synthetic polypeptide
LDV

SEQ ID NO: 27148 - protein, 3 aa, Artificial Sequence
  Synthetic polypeptide
LDV

SEQ ID NO: 27149 - protein, 3 aa, Artificial Sequence
  Synthetic polypeptide
LDV

SEQ ID NO: 27150 - protein, 3 aa, Artificial Sequence
  Synthetic polypeptide
LDV

SEQ ID NO: 27151 - protein, 3 aa, Artificial Sequence
  Synthetic polypeptide
LDV

SEQ ID NO: 27152 - protein, 3 aa, Artificial Sequence
  Synthetic polypeptide
LDV

SEQ ID NO: 27153 - protein, 96 aa, Artificial Sequence
  Synthetic polypeptide
MMSSFLACQCVLPHWHQPLWCVGQQDGSVAVFPNRDAGSRYQLALCSSGSQYFWSHWPQCRAWPCHRHGGFFYDAHHGAPGGSTPHLGVWECLRHR

SEQ ID NO: 27154 - protein, 96 aa, Artificial Sequence; identical to SEQ ID NO: 27153
  Synthetic polypeptide

SEQ ID NO: 27155 - protein, 96 aa, Artificial Sequence; identical to SEQ ID NO: 27153
  Synthetic polypeptide

SEQ ID NO: 27156 - protein, 96 aa, Artificial Sequence; identical to SEQ ID NO: 27153
  Synthetic polypeptide

SEQ ID NO: 27157 - protein, 96 aa, Artificial Sequence; identical to SEQ ID NO: 27153
  Synthetic polypeptide

SEQ ID NO: 27158 - protein, 96 aa, Artificial Sequence; identical to SEQ ID NO: 27153
  Synthetic polypeptide

SEQ ID NO: 27159 - protein, 49 aa, Artificial Sequence
  Synthetic polypeptide
MMSSFLACQCVLPHWHQPLWCVGQQDGSVAVFPNRDAGSRYQLALSTKL

SEQ ID NO: 27160 - protein, 656 aa, Artificial Sequence
  Synthetic polypeptide
CVPVAPATWEAEYPPGMRQQVFQFFSKVLAQVQHPLLHYLSVHRPVQKLLRLGGTASGSVTEKEEVQFTTVLCSKIQQDPELLAYILEGKKIVGRKKACGEPTALPKDTTSHGDKDCSHDGAPARPQLDGESCGAQALNSHMPAETEELDGGTTESNLITSLLGLCQSKKSRVALKAQENLLLLVSMASPAAATYLVQSSACCPAIVRHLCQLYRSMPVFLDPADIATLEGISWRLPSAPSDEASFPGKEALAAFLGWFDYCDHLITEAHTVVADALAKAVAENFFVETLQPQLLHVSEQSILTSTALLTAMLRQLRSPALLREAVAFLLGTDRQPEAPGDNPHTLYAHLIGHCDHLSDEISITTLRLFEELLQKPHEGIIHSLVLRNLEGRPYVAWGSPEPESYEDTLDLEEDPYFTDSFLDSGFQTPAKPRLAPATSYDGKTAVTEIVNSFLCLVPEEAKTSAFLEETGYDTYVHDAYGLFQECSSRVASWGWPLTPTPLDPHEPERPFFEGHFLRVLFDRMSRILDQPYSLNLQVTSVLSRLALFPHPHIHEYLLDPYISLAPGCRSLFSVLVRVIGDLMQRIQRVPQFPGKLLLVRKQLTGQAPGEQLDHQTLLQGVVVLEEFCKELAAIAFVKFPPHDPRQNVSPAPEGQV

SEQ ID NO: 27161 - protein, 656 aa, Artificial Sequence; identical to SEQ ID NO: 27160
  Synthetic polypeptide

SEQ ID NO: 27162 - protein, 88 aa, Artificial Sequence
  Synthetic polypeptide
PQLRGRPSTPQACGSRCSSSSARFWRRCSTPCCITSASTGLCRNSSDLVGLLPDPLQKRRRCSSPPSSAPRSSRTQSCSPTSWKVKRL

SEQ ID NO: 27163 - protein, 88 aa, Artificial Sequence; identical to SEQ ID NO: 27162
  Synthetic polypeptide

SEQ ID NO: 27164 - protein, 93 aa, Artificial Sequence
  Synthetic polypeptide
PGMVMRACSPSYVGGRVPPRHAAAGVPVLQQGSGAGAAPPAALPQRPQACAETPPTWWDCFRIRYRKGGGAVHHRPLLQDPAGPRAARLHPGR

SEQ ID NO: 27165 - protein, 93 aa, Artificial Sequence; identical to SEQ ID NO: 27164
  Synthetic polypeptide

SEQ ID NO: 27166 - protein, 33 aa, Artificial Sequence
  Synthetic polypeptide
TRHLVSTLWKIIMSPSLQWCLGAFIFSFSQRRS

SEQ ID NO: 27167 - protein, 33 aa, Artificial Sequence; identical to SEQ ID NO: 27166
  Synthetic polypeptide

SEQ ID NO: 27168 - protein, 33 aa, Artificial Sequence; identical to SEQ ID NO: 27166
  Synthetic polypeptide

SEQ ID NO: 27169 - protein, 33 aa, Artificial Sequence; identical to SEQ ID NO: 27166
  Synthetic polypeptide

SEQ ID NO: 27170 - protein, 33 aa, Artificial Sequence; identical to SEQ ID NO: 27166
  Synthetic polypeptide

SEQ ID NO: 27171 - protein, 37 aa, Artificial Sequence
  Synthetic polypeptide
PGIWFQPSGRLLCLQVCSGVWGLLSFLFHREDLEDSS

SEQ ID NO: 27172 - protein, 37 aa, Artificial Sequence; identical to SEQ ID NO: 27171
  Synthetic polypeptide

SEQ ID NO: 27173 - protein, 37 aa, Artificial Sequence; identical to SEQ ID NO: 27171
  Synthetic polypeptide

SEQ ID NO: 27174 - protein, 37 aa, Artificial Sequence; identical to SEQ ID NO: 27171
  Synthetic polypeptide

SEQ ID NO: 27175 - protein, 37 aa, Artificial Sequence; identical to SEQ ID NO: 27171
  Synthetic polypeptide

SEQ ID NO: 27176 - protein, 284 aa, Artificial Sequence
  Synthetic polypeptide
PAFGFNPLEDYYVSKSAVVFGGFYLFFFTEKILKILLKQKNEHHHGHSHYASESLPSKKDQEEGVMEKLQNGDLDHMIPQHCSSELDGKAPMVDEKVIVGSLSVQDLQASQSACYWLKGVRYSDIGTLAWMITLSDGLHNFIDGLAIGASFTVSVFQGISTSVAILCEEFPHELGDFVILLNAGMSIQQALFFNFLSACCCYLGLAFGILAGSHFSANWIFALAGGMFLYISLADMFPEMNEVCQEDERKGSILIPFIIQNLGLLTGFTIMVVLTMYSGQIQIG

SEQ ID NO: 27177 - protein, 284 aa, Artificial Sequence; identical to SEQ ID NO: 27176
  Synthetic polypeptide

SEQ ID NO: 27178 - protein, 284 aa, Artificial Sequence; identical to SEQ ID NO: 27176
  Synthetic polypeptide

SEQ ID NO: 27179 - protein, 273 aa, Artificial Sequence
  Synthetic polypeptide
PAFGFNPLEDYYVSKSAVVFGGFYLFFFTEKILKILLKQKNEHHHGHSHYASESLPSKKDQEEGVMEKLQNGDLDHMIPQHCSSELDGKAPMVDEKVIVGSLSVQDLQASQSACYWLKGVRYSDIGTLAWMITLSDGLHNFIDGLAIGASFTVSVFQGISTSVAILCEEFPHELGDFVILLNAGMSIQQALFFNFLSACCCYLGLAFGILAGSHFSANWIFALAGGMFLYISLADMMEFCSVAQAGVQWCHLSSLQPLPLGLKRLSCLSLPSN

SEQ ID NO: 27180 - protein, 170 aa, Artificial Sequence
  Synthetic polypeptide
PAFGFNPLEDYYVSKSAVVFGGFYLFFFTEKILKILLKQKNEHHHGHSHYASESLPSKKDQEEGVMEKLQNGDLDHMIPQHCSSELDGKAPMVDEKVIVGSLSVQDLQASQSACYWLKGVRYSDIGTLAWMITLSDGLHNFIDGLAIGASFTVSVFQGISTSVAILCEEF

SEQ ID NO: 27181 - protein, 46 aa, Artificial Sequence
  Synthetic polypeptide
PLYLEVHPENSQRYWGLLSHTHFAGSPTCHPGPSLLGWCLPLLSRE

SEQ ID NO: 27182 - protein, 489 aa, Artificial Sequence
  Synthetic polypeptide
LLWLSELQWAHSYLLGFTNPCTWKFIQRTHNDTGGCSHILTLQALPPVTLALLCLDGVFLSSAENDFVHRIQEELDRFLLQKQLSKVLLFPPLSSRLRYLIHRTAENFDLLSSFSVGEGWKRRTVICHQDIRVPSSDGLSGPCRAPASCPSRYHGPRPISNQGAAAVPRGARAGRWYRGRKPDQPLYVPRVLRRQEEWGLTSTSVLKREAPAGRDPEEPGDVGAGDPNSDQGLPVLMTQGTEDLKGPGQRCENEPLLDPVGPEPLGPESQSGKGDMVEMATRFGSTLQLDLEKGKESLLEKRLVAEEEEDEEEVEEDGPSSCSEDDYSELLQEITDNLTKKEIQIEKIHLDTSSFVEELPGEKDLAHVVEIYDFEPALKTEDLLATFSEFQEKGFRIQWVDDTHALGIFPCLASAAEALTREFSVLKIRPLTQGTKQSKLKALQRPKLLRLVKERPQTNATVARRLVARALGLQHKKKERPAVRGPLPP

SEQ ID NO: 27183 - protein, 103 aa, Artificial Sequence
  Synthetic polypeptide
VPNNYCGYLSFSGHIPISWALLTLVLGSSSRELTTILGAALTYSLCRLSHLSPWPFSAWMVSSSPQPRMTSSTGSRRNWTAFCCRSSCQRFFFSPHSPVASGT

SEQ ID NO: 27184 - protein, 457 aa, Artificial Sequence
  Synthetic polypeptide
HLDRGLPVSRTALPPVTLALLCLDGVFLSSAENDFVHRIQEELDRFLLQKQLSKVLLFPPLSSRLRYLIHRTAENFDLLSSFSVGEGWKRRTVICHQDIRVPSSDGLSGPCRAPASCPSRYHGPRPISNQGAAAVPRGARAGRWYRGRKPDQPLYVPRVLRRQEEWGLTSTSVLKREAPAGRDPEEPGDVGAGDPNSDQGLPVLMTQGTEDLKGPGQRCENEPLLDPVGPEPLGPESQSGKGDMVEMATRFGSTLQLDLEKGKESLLEKRLVAEEEEDEEEVEEDGPSSCSEDDYSELLQEITDNLTKKEIQIEKIHLDTSSFVEELPGEKDLAHVVEIYDFEPALKTEDLLATFSEFQEKGFRIQWVDDTHALGIFPCLASAAEALTREFSVLKIRPLTQGTKQSKLKALQRPKLLRLVKERPQTNATVARRLVARALGLQHKKKERPAVRGPLPP

SEQ ID NO: 27185 - protein, 97 aa, Artificial Sequence
  Synthetic polypeptide
TEGPPSEEAANGQPSASRGDRPQRKPNPADILIVDFQSLERLSHLSPWPFSAWMVSSSPQPRMTSSTGSRRNWTAFCCRSSCQRFFFSPHSPVASGT

SEQ ID NO: 27186 - protein, 23 aa, Artificial Sequence
  Synthetic polypeptide
NGSPTCHPGPSLLGWCLPLLSRE

SEQ ID NO: 27187 - protein, 49 aa, Artificial Sequence
  Synthetic polypeptide
DLMVIIRGDFPAQALSLPAAIHVRCDLLLLAFCQDCETSPATWNCVQQW

SEQ ID NO: 27188 - protein, 49 aa, Artificial Sequence; identical to SEQ ID NO: 27187
  Synthetic polypeptide

SEQ ID NO: 27189 - protein, 49 aa, Artificial Sequence; identical to SEQ ID NO: 27187
  Synthetic polypeptide

SEQ ID NO: 27190 - protein, 161 aa, Artificial Sequence
  Synthetic polypeptide
DVTCSSLLSAKIVRLPQPRGTVCNNGECLNMEKVYISTNCPSQCNENPVDGHGLQCHCEEGQAPVACEETLHVTNITILVVVLVLVIVGIGVLILLVRYRKCIKLKQVQSPPTETLGVENKGYFGDEQQIRTEPILPEIHFLNKPASKDSRGIADPNQSAK

SEQ ID NO: 27191 - protein, 15 aa, Artificial Sequence
  Synthetic polypeptide
DFPSHVELCATMVNV

SEQ ID NO: 27192 - protein, 15 aa, Artificial Sequence
  Synthetic polypeptide
DFPSHVELCATMVNV

SEQ ID NO: 27193 - protein, 15 aa, Artificial Sequence
  Synthetic polypeptide
DFPSHVELCATMVNV

SEQ ID NO: 27194 - protein, 183 aa, Artificial Sequence
  Synthetic polypeptide
DVTCSSLLSAKIVRLPQPRGTVCNNGECLNMEKVYISTNCPSQCNENPVDGHGLQCHCEEGQAPVACEETLHVTNITILVVVLVLVIVGIGVLILLVRYRKCIKLKQVQSPPTETLGVENKGYFGDEQQIRTEPILPEIHFLNQRTPESLESLPTSFSSPHYITLKPASKDSRGIADPNQSAK

SEQ ID NO: 27195 - protein, 151 aa, Artificial Sequence
  Synthetic polypeptide
DVTCSSLLSAKIVRLPQPRGTVCNNGECLNMEKVYISTNCPSQCNENPVDGHGLQCHCEEGQAPVACEETLHVTNITILVVVLVLVIVGIGVLILLVRYRKCIKLKQVQSPPTETLGVENKGYFGDEQQIRTEPILPEIHFLNHLLYGRHQ

SEQ ID NO: 27196 - protein, 431 aa, Artificial Sequence
  Synthetic polypeptide
TPDLPVPWSWTSSLQNLSRPRSSPDDLKALTRNVNRLNESFRDLQLRLLQAPLQADLTEQVWKVQDALQNQSDSLLALAGAVQRLEGALWGLQAQAVQTEQAVALLRDRTGQQSDTAQLELYQLQVESNSSQLLLRRHAGLLDGLARRVGILGEELADVGGVLRGLNHSLSYDVALHRTRLQDLRVLVSNASEDTRRLRLAHVGMELQLKQELAMLNAVTEDLRLKDWEHSIALRNISLAKGPPGPKGDQGDEGKEGRPGIPGLPGLRGLPGERGTPGLPGPKGDDGKLGATGPMGMRGFKGDRGPKGEKGEKGDRAGDASGVEAPMMIRLVNGSGPHEGRVEVYHDRRWGTVCDDGWDKKDGDVVCRMLGFRGVEEVYRTARFGQGTGRIWMDDVACKGTEETIFRCSFSKWGVTNCGHAEDASVTCNRH

SEQ ID NO: 27197 - protein, 33 aa, Artificial Sequence
  Synthetic polypeptide
GVGRLCRHLICRCLGLGLPASRTCPGRAAPLTT

SEQ ID NO: 27198 - protein, 33 aa, Artificial Sequence; identical to SEQ ID NO: 27197
  Synthetic polypeptide

SEQ ID NO: 27199 - protein, 33 aa, Artificial Sequence; identical to SEQ ID NO: 27197
  Synthetic polypeptide

SEQ ID NO: 27200 - protein, 33 aa, Artificial Sequence; identical to SEQ ID NO: 27197
  Synthetic polypeptide

SEQ ID NO: 27201 - protein, 21 aa, Artificial Sequence
  Synthetic polypeptide
SAGALVLDFQPPELVQAAQLP

SEQ ID NO: 27202 - protein, 21 aa, Artificial Sequence
  Synthetic polypeptide
SAGALVLDFQPPELVQAAQLP

SEQ ID NO: 27203 - protein, 21 aa, Artificial Sequence
  Synthetic polypeptide
SAGALVLDFQPPELVQAAQLP

SEQ ID NO: 27204 - protein, 21 aa, Artificial Sequence
  Synthetic polypeptide
SAGALVLDFQPPELVQAAQLP

SEQ ID NO: 27205 - protein, 336 aa, Artificial Sequence
  Synthetic polypeptide
TPDLPVPWSWTSSLQNLSRPRSSPDDLKALTRNVNRLNESFRDLQLRLLQAPLQADLTEQVWKVQDALQNQSDSLLALAGAVQRLEGALWGLQAQAVQTEQAVALLRDRTGQQSDTAQLELYQLQVESNSSQLLLRRHAGLLDGLARRVGILGEELADVGGVLRGLNHSLSYDVALHRTRLQDLRVLVSNASEDTRRLRLAHVGMELQLKQELAMLNAVTEDLRLKDWEHSIALRNISLAKGPPGPKGDQGDEGKEGRPGIPGLPGLRGLPGERGTPGLPGPKGDDGKLGATGPMGMRGFKGDRGPKGEKGEKGDRAGDASKDILLGPWDMVLAQG

SEQ ID NO: 27206 - protein, 336 aa, Artificial Sequence; identical to SEQ ID NO: 27205
  Synthetic polypeptide

SEQ ID NO: 27207 - protein, 336 aa, Artificial Sequence; identical to SEQ ID NO: 27205
  Synthetic polypeptide

SEQ ID NO: 27208 - protein, 542 aa, Artificial Sequence
  Synthetic polypeptide
SGDLSPAELMMLTIGDVIKQLIEAHEQGKDIDLNKVKTKTAAKYGLSAQPRLVDIIAAVPPQYRKVLMPKLKAKPIRTASGIAVVAVMCKPHRCPHISFTGNICVYCPGGPDSDFEYSTQSYTGYEPTSMRAIRARYDPFLQTRHRIEQLKQLGHSVDKVEFIVMGGTFMALPEEYRDYFIRNLHDALSGHTSNNIYEAVKYSERSLTKCIGITIETRPDYCMKRHLSDMLTYGCTRLEIGVQSVYEDVARDTNRGHTVKAVCESFHLAKDSGFKVVAHMMPDLPNVGLERDIEQFTEFFENPAFRPDGLKLYPTLVIRGTGLYELWKSGRYKSYSPSDLVELVARILALVPPWTRVYRVQRDIPMPLVSSGVEHGNLRELALARMKDLGIQCRDVRTREVGIQEIHHKVRPYQVELVRRDYVANGGWETFLSYEDPDQDILIGLLRLRKCSEETFRFELGGGVSIVRELHVYGSVVPVSSRDPTKFQHQGFGMLLMEEAERIAREEHGSGKIAVISGVGTRNYYRKIGYRLQGPYMVKMLK

SEQ ID NO: 27209 - protein, 12 aa, Artificial Sequence
  Synthetic polypeptide
ILHSLEISALLS

SEQ ID NO: 27210 - protein, 12 aa, Artificial Sequence
  Synthetic polypeptide
ILHSLEISALLS

SEQ ID NO: 27211 - protein, 12 aa, Artificial Sequence
  Synthetic polypeptide
ILHSLEISALLS

SEQ ID NO: 27212 - protein, 62 aa, Artificial Sequence
  Synthetic polypeptide
RALVTGPHAKQLVTKRARVPGPAEASGDLSSSVQGGVANSGAQAVASWSGGESSIVWRSQPC

SEQ ID NO: 27213 - protein, 62 aa, Artificial Sequence; identical to SEQ ID NO: 27212
  Synthetic polypeptide

SEQ ID NO: 27214 - protein, 62 aa, Artificial Sequence; identical to SEQ ID NO: 27212
  Synthetic polypeptide

SEQ ID NO: 27215 - protein, 40 aa, Artificial Sequence
  Synthetic polypeptide
SGDLSPAELMMLTIGDVIKQLIEAHEQGKDIDLNKLLSWL

SEQ ID NO: 27216 - protein, 40 aa, Artificial Sequence; identical to SEQ ID NO: 27215
  Synthetic polypeptide

SEQ ID NO: 27217 - protein, 542 aa, Artificial Sequence; identical to SEQ ID NO: 27208
  Synthetic polypeptide

SEQ ID NO: 27218 - protein, 12 aa, Artificial Sequence
  Synthetic polypeptide
ILHSLEISALLS

SEQ ID NO: 27219 - protein, 12 aa, Artificial Sequence
  Synthetic polypeptide
ILHSLEISALLS

SEQ ID NO: 27220 - protein, 12 aa, Artificial Sequence
  Synthetic polypeptide
ILHSLEISALLS

SEQ ID NO: 27221 - protein, 40 aa, Artificial Sequence; identical to SEQ ID NO: 27215
  Synthetic polypeptide

SEQ ID NO: 27222 - protein, 40 aa, Artificial Sequence; identical to SEQ ID NO: 27215
  Synthetic polypeptide

SEQ ID NO: 27223 - protein, 34 aa, Artificial Sequence
  Synthetic polypeptide
ILHSLVSVVPNSGAQDVASRSGGESSIVWRSQPC

SEQ ID NO: 27224 - protein, 34 aa, Artificial Sequence; identical to SEQ ID NO: 27223
  Synthetic polypeptide

SEQ ID NO: 27225 - protein, 34 aa, Artificial Sequence; identical to SEQ ID NO: 27223
  Synthetic polypeptide

SEQ ID NO: 27226 - protein, 57 aa, Artificial Sequence
  Synthetic polypeptide
QCHCLLALGFWTNRRGEAAAWRVSCPDALESGPSWEPGCWDPVPRRGPRLPHPRSHC

SEQ ID NO: 27227 - protein, 62 aa, Artificial Sequence
  Synthetic polypeptide
LWDFGQIGEERQQHGECPVPTPWKAVPPGSPGVGTQCLGGALGCPTLGATARRGRSPAFHHL

SEQ ID NO: 27228 - protein, 26 aa, Artificial Sequence
  Synthetic polypeptide
GGAMRLLKHHLATTIVTVASGHPLRS

SEQ ID NO: 27229 - protein, 26 aa, Artificial Sequence
  Synthetic polypeptide
GGAMRLLKHHLATTIVTVASGHPLRS

SEQ ID NO: 27230 - protein, 26 aa, Artificial Sequence
  Synthetic polypeptide
GGAMRLLKHHLATTIVTVASGHPLRS

SEQ ID NO: 27231 - protein, 26 aa, Artificial Sequence
  Synthetic polypeptide
GGAMRLLKHHLATTIVTVASGHPLRS

SEQ ID NO: 27232 - protein, 26 aa, Artificial Sequence
  Synthetic polypeptide
GGAMRLLKHHLATTIVTVASGHPLRS

SEQ ID NO: 27233 - protein, 26 aa, Artificial Sequence
  Synthetic polypeptide
GGAMRLLKHHLATTIVTVASGHPLRS

SEQ ID NO: 27234 - protein, 26 aa, Artificial Sequence
  Synthetic polypeptide
GGAMRLLKHHLATTIVTVASGHPLRS

SEQ ID NO: 27235 - protein, 26 aa, Artificial Sequence
  Synthetic polypeptide
GGAMRLLKHHLATTIVTVASGHPLRS

SEQ ID NO: 27236 - protein, 75 aa, Artificial Sequence
  Synthetic polypeptide
QLLQGIRFDPEIPQTLRLEFAKANTKMAKNKLVGTPNPSTPLPNTVPQFIAREPLMRWLPPSEATSQGWKSRQFC

SEQ ID NO: 27237 - protein, 33 aa, Artificial Sequence
  Synthetic polypeptide
RSNEITKAPFGNYNSNSCFRASASILKFRKHYD

SEQ ID NO: 27238 - protein, 33 aa, Artificial Sequence; identical to SEQ ID NO: 27237
  Synthetic polypeptide

SEQ ID NO: 27239 - protein, 33 aa, Artificial Sequence; identical to SEQ ID NO: 27237
  Synthetic polypeptide

SEQ ID NO: 27240 - protein, 33 aa, Artificial Sequence; identical to SEQ ID NO: 27237
  Synthetic polypeptide

SEQ ID NO: 27241 - protein, 33 aa, Artificial Sequence; identical to SEQ ID NO: 27237
  Synthetic polypeptide

SEQ ID NO: 27242 - protein, 33 aa, Artificial Sequence; identical to SEQ ID NO: 27237
  Synthetic polypeptide

SEQ ID NO: 27243 - protein, 33 aa, Artificial Sequence; identical to SEQ ID NO: 27237
  Synthetic polypeptide

SEQ ID NO: 27244 - protein, 33 aa, Artificial Sequence; identical to SEQ ID NO: 27237
  Synthetic polypeptide

SEQ ID NO: 27245 - protein, 118 aa, Artificial Sequence
  Synthetic polypeptide
QLLQGIRFDPEIPQTLRLEFAKANTKMAKNKLVGTPNPSTPLPNTVPQFIAREPYELTVPALYPSSPEVWAPYPLYPAELAPALPPPAFTYPASLHAQMRWLPPSEATSQGWKSRQFC

SEQ ID NO: 27246 - protein, 118 aa, Artificial Sequence; identical to SEQ ID NO: 27245
  Synthetic polypeptide

SEQ ID NO: 27247 - protein, 141 aa, Artificial Sequence
  Synthetic polypeptide
QLLQGIRFDPEIPQTLRLEFAKANTKMAKNKLVGTPNPSTPLPNTVPQFIAREPYELTVPALYPSSPEVWAPYPLYPAELAPALPPPAFTYPASLHAQCFSPEAKPNTPVFCPLLQQIRFVSGNVFVTYQPTADQQRELPC

SEQ ID NO: 27248 - protein, 126 aa, Artificial Sequence
  Synthetic polypeptide
QLLQGIRFDPEIPQTLRLEFAKANTKMAKNKLVGTPNPSTPLPNTVPQFIAREPYELTVPALYPSSPEVWAPYPLYPAELAPALPPPAFTYPASLHAQLCEGQTVRRSHPLSAPSPDSASLAWFPV

SEQ ID NO: 27249 - protein, 146 aa, Artificial Sequence
  Synthetic polypeptide
QLLQGIRFDPEIPQTLRLEFAKANTKMAKNKLVGTPNPSTPLPNTVPQFIAREPYELTVPALYPSSPEVWAPYPLYPAELAPALPPPAFTYPASLHAQVIDTHRPGLHSLHHQSFQTWFPRAHHTTNTYPANRSTLKRLMIPSKSS

SEQ ID NO: 27250 - protein, 65 aa, Artificial Sequence
  Synthetic polypeptide
QLLQGIRFDPEIPQTLRLEFAKANTKMAKNKLVGTPNPSTPLPNTVPQFIAREPLGGANEHGERQ

SEQ ID NO: 27251 - protein, 101 aa, Artificial Sequence
  Synthetic polypeptide
QLLQGIRFDPEIPQTLRLEFAKANTKMAKNKLVGTPNPSTPLPNTVPQFIAREPYELTVPALYPSSPEVWAPYPLYPAELAPALPPPAFTYPASLHAQETL

SEQ ID NO: 27252 - protein, 42 aa, Artificial Sequence
  Synthetic polypeptide
ESLGWIFNLAVSQLSHKMSSQCLHFTPVALKCGPRTLCTQRS

SEQ ID NO: 27253 - protein, 42 aa, Artificial Sequence; identical to SEQ ID NO: 27252
  Synthetic polypeptide

SEQ ID NO: 27254 - protein, 42 aa, Artificial Sequence; identical to SEQ ID NO: 27252
  Synthetic polypeptide

SEQ ID NO: 27255 - protein, 42 aa, Artificial Sequence; identical to SEQ ID NO: 27252
  Synthetic polypeptide

SEQ ID NO: 27256 - protein, 42 aa, Artificial Sequence; identical to SEQ ID NO: 27252
  Synthetic polypeptide

SEQ ID NO: 27257 - protein, 42 aa, Artificial Sequence; identical to SEQ ID NO: 27252
  Synthetic polypeptide

SEQ ID NO: 27258 - protein, 42 aa, Artificial Sequence; identical to SEQ ID NO: 27252
  Synthetic polypeptide

SEQ ID NO: 27259 - protein, 42 aa, Artificial Sequence; identical to SEQ ID NO: 27252
  Synthetic polypeptide

SEQ ID NO: 27260 - protein, 42 aa, Artificial Sequence; identical to SEQ ID NO: 27252
  Synthetic polypeptide

SEQ ID NO: 27261 - protein, 24 aa, Artificial Sequence
  Synthetic polypeptide
FTSWLCESRWAGYLTSLCLSFLIR

SEQ ID NO: 27262 - protein, 24 aa, Artificial Sequence
  Synthetic polypeptide
FTSWLCESRWAGYLTSLCLSFLIR

SEQ ID NO: 27263 - protein, 24 aa, Artificial Sequence
  Synthetic polypeptide
FTSWLCESRWAGYLTSLCLSFLIR

SEQ ID NO: 27264 - protein, 24 aa, Artificial Sequence
  Synthetic polypeptide
FTSWLCESRWAGYLTSLCLSFLIR

SEQ ID NO: 27265 - protein, 24 aa, Artificial Sequence
  Synthetic polypeptide
FTSWLCESRWAGYLTSLCLSFLIR

SEQ ID NO: 27266 - protein, 24 aa, Artificial Sequence
  Synthetic polypeptide
FTSWLCESRWAGYLTSLCLSFLIR

SEQ ID NO: 27267 - protein, 24 aa, Artificial Sequence
  Synthetic polypeptide
FTSWLCESRWAGYLTSLCLSFLIR

SEQ ID NO: 27268 - protein, 24 aa, Artificial Sequence
  Synthetic polypeptide
FTSWLCESRWAGYLTSLCLSFLIR

SEQ ID NO: 27269 - protein, 24 aa, Artificial Sequence
  Synthetic polypeptide
FTSWLCESRWAGYLTSLCLSFLIR

SEQ ID NO: 27270 - protein, 24 aa, Artificial Sequence
  Synthetic polypeptide
FTSWLCESRWAGYLTSLCLSFLIR

SEQ ID NO: 27271 - protein, 38 aa, Artificial Sequence
  Synthetic polypeptide
ESLGWIFNLAVSQLSHKMSSQCLHFTPVALKCGPRTLC

SEQ ID NO: 27272 - protein, 1635 aa, Artificial Sequence
  Synthetic polypeptide
GRVRWLMPVKPALWEAEAGGSRGTTVPALLNSTSNQLYLHFQSDISVAAAGFHLEYKTVGLAACQEPALPSNSIKIGDRYMVNDVLSFQCEPGYTLQGRSHISCMPGTVRRWNYPSPLCIATCGGTLSTLGGVILSPGFPGSYPNNLDCTWRISLPIGYGAHIQFLNFSTEANHDFLEIQNGPYHTSPMIGQFSGTDLPAALLSTTHETLIHFYSDHSQNRQGFKLAYQAYELQNCPDPPPFQNGYMINSDYSVGQSVSFECYPGYILIGHPVLTCQHGINRNWNYPFPRCDAPCGYNVTSQNGTIYSPGFPDEYPILKDCIWLITVPPGHGVYINFTLLQTEAVNDYIAVWDGPDQNSPQLGVFSGNTALETAYSSTNQVLLKFHSDFSNGGFFVLNFHAFQLKKCQPPPAVPQAEMLTEDDDFEIGDFVKYQCHPGYTLVGTDILTCKLSSQLQFEGSLPTCEGSSGQSPLLVVLSGNHTEQSNFTSRSNQLYLRWSTDHATSKKGFKIRYAAPYCSLTHPLKNGGILNRTAGAVGSKVHYFCKPGYRMVGHSNATCRRNPLGMYQWDSLTPLCQAVSCGIPESPGNGSFTGNEFTLDSKVVYECHEGFKLESSQQATAVCQEDGLWSNKGKPPTCKPVACPSIEAQLSEHVIWRLVSGSLNEYGAQVLLSCSPGYYLEGWRLLRCQANGTWNIGDERPSCRVISCGSLSFPPNGNKIGTLTVYGATAIFTCNTGYTLVGSHVRECLANGLWSGSETRCLAGHCGSPDPIVNGHISGDGFSYRDTVVYQCNPGFRLVGTSVRICLQDHKWSGQTPVCVPITCGHPGNPAHGFTNGSEFNLNDVVNFTCNTGYLLQGVSRAQCRSNGQWSSPLPTCRVVNCSDPGFVENAIRHGQQNFPESFEYGMSILYHCKKGFYLLGSSALTCMANGLWDRSLPKCLAISCGHPGVPANAVLTGELFTYGAVVHYSCRGSESLIGNDTRVCQEDSHWSGALPHCTGNNPGFCGDPGTPAHGSRLGDDFKTKSLLRFSCEMGHQLRGSPERTCLLNGSWSGLQPVCEAVSCGNPGTPTNGMIVSSDGILFSSSVIYACWEGYKTSGLMTRHCTANGTWTGTAPDCTIISCGDPGTLANGIQFGTDFTFNKTVSYQCNPGYVMEAVTSATIRCTKDGRWNPSKPVCKAVLCPQPPPVQNGTVEGSDFRWGSSISYSCMDGYQLSHSAILSCEGRGVWKGEIPQCLPVFCGDPGIPAEGRLSGKSFTYKSEVFFQCKSPFILVGSSRRVCQADGTWSGIQPTCIDPAHNTCPDPGTPHFGIQNSSRGYEVGSTVFFRCRKGYHIQGSTTRTCLANLTWSGIQTECIPHACRQPETPAHADVRAIDLPTFGYTLVYTCHPGFFLAGGSEHRTCKADMKWTGKSPVCKIPSDVFFVNSLWKGYYEYLGKRQPATLTVDWFNATSSKVNATFSEASPVELKLTGIYKKEEAHLLLKAFQIKGQADIFVSKFENDNWGLDGYVSSGLERGGFTFQGDIHGKDFGKFKLERQDPLNPDQDSSSHYHGTSSGSVAAAILVPFFALILSGFAFYLYKHRTRPKVQYNGYAGHENSNGQASFENPMYDTNLKPTEAKAVRFDTTLNTVCTVV

SEQ ID NO: 27273 - protein, 20 aa, Artificial Sequence
  Synthetic polypeptide
SQHFGRLRRADHEAPQYRHC

SEQ ID NO: 27274 - protein, 20 aa, Artificial Sequence
  Synthetic polypeptide
SQHFGRLRRADHEAPQYRHC

SEQ ID NO: 27275 - protein, 20 aa, Artificial Sequence
  Synthetic polypeptide
SQHFGRLRRADHEAPQYRHC

SEQ ID NO: 27276 - protein, 20 aa, Artificial Sequence
  Synthetic polypeptide
SQHFGRLRRADHEAPQYRHC

SEQ ID NO: 27277 - protein, 20 aa, Artificial Sequence
  Synthetic polypeptide
SQHFGRLRRADHEAPQYRHC

SEQ ID NO: 27278 - protein, 20 aa, Artificial Sequence
  Synthetic polypeptide
SQHFGRLRRADHEAPQYRHC

SEQ ID NO: 27279 - protein, 20 aa, Artificial Sequence
  Synthetic polypeptide
SQHFGRLRRADHEAPQYRHC

SEQ ID NO: 27280 - protein, 20 aa, Artificial Sequence
  Synthetic polypeptide
SQHFGRLRRADHEAPQYRHC

SEQ ID NO: 27281 - protein, 26 aa, Artificial Sequence
  Synthetic polypeptide
GGRITRHHSTGTAEQYFQPTLPAFPV

SEQ ID NO: 27282 - protein, 26 aa, Artificial Sequence
  Synthetic polypeptide
GGRITRHHSTGTAEQYFQPTLPAFPV

SEQ ID NO: 27283 - protein, 26 aa, Artificial Sequence
  Synthetic polypeptide
GGRITRHHSTGTAEQYFQPTLPAFPV

SEQ ID NO: 27284 - protein, 26 aa, Artificial Sequence
  Synthetic polypeptide
GGRITRHHSTGTAEQYFQPTLPAFPV

SEQ ID NO: 27285 - protein, 26 aa, Artificial Sequence
  Synthetic polypeptide
GGRITRHHSTGTAEQYFQPTLPAFPV

SEQ ID NO: 27286 - protein, 26 aa, Artificial Sequence
  Synthetic polypeptide
GGRITRHHSTGTAEQYFQPTLPAFPV

SEQ ID NO: 27287 - protein, 26 aa, Artificial Sequence
  Synthetic polypeptide
GGRITRHHSTGTAEQYFQPTLPAFPV

SEQ ID NO: 27288 - protein, 26 aa, Artificial Sequence
  Synthetic polypeptide
GGRITRHHSTGTAEQYFQPTLPAFPV

SEQ ID NO: 27289 - protein, 1536 aa, Artificial Sequence
  Synthetic polypeptide
GRVRWLMPVKPALWEAEAGGSRGTTVPALLNSTSNQLYLHFQSDISVAAAGFHLEYKTVGLAACQEPALPSNSIKIGDRYMVNDVLSFQCEPGYTLQGRSHISCMPGTVRRWNYPSPLCIATCGGTLSTLGGVILSPGFPGSYPNNLDCTWRISLPIGYGAHIQFLNFSTEANHDFLEIQNGPYHTSPMIGQFSGTDLPAALLSTTHETLIHFYSDHSQNRQGFKLAYQAYELQNCPDPPPFQNGYMINSDYSVGQSVSFECYPGYILIGHPVLTCQHGINRNWNYPFPRCDAPCGYNVTSQNGTIYSPGFPDEYPILKDCIWLITVPPGHGVYINFTLLQTEAVNDYIAVWDGPDQNSPQLGVFSGNTALETAYSSTNQVLLKFHSDFSNGGFFVLNFHAFQLKKCQPPPAVPQAEMLTEDDDFEIGDFVKYQCHPGYTLVGTDILTCKLSSQLQFEGSLPTCEAQCPANEVRTGSSGVILSPGYPGNYFNSQTCSWSIKVEPNYNITIFVDTFQSEKQFDALEVFDGSSGQSPLLVVLSGNHTEQSNFTSRSNQLYLRWSTDHATSKKGFKIRYAAPYCSLTHPLKNGGILNRTAGAVGSKVHYFCKPGYRMVGHSNATCRRNPLGMYQWDSLTPLCQAVSCGIPESPGNGSFTGNEFTLDSKVVYECHEGFKLESSQQATAVCQEDGLWSNKGKPPTCKPVACPSIEAQLSEHVIWRLVSGSLNEYGAQVLLSCSPGYYLEGWRLLRCQANGTWNIGDERPSCRAGHCGSPDPIVNGHISGDGFSYRDTVVYQCNPGFRLVGTSVRICLQDHKWSGQTPVCVPITCGHPGNPAHGFTNGSEFNLNDVVNFTCNTGYLLQGVSRAQCRSNGQWSSPLPTCRVVNCSDPGFVENAIRHGQQNFPESFEYGMSILYHCKKGFYLLGSSALTCMANGLWDRSLPKCLAISCGHPGVPANAVLTGELFTYGAVVHYSCRGSESLIGNDTRVCQEDSHWSGALPHCTGNNPGFCGDPGTPAHGSRLGDDFKTKSLLRFSCEMGHQLRGSPERTCLLNGSWSGLQPVCEAVLCPQPPPVQNGTVEGSDFRWGSSISYSCMDGYQLSHSAILSCEGRGVWKGEIPQCLPVFCGDPGIPAEGRLSGKSFTYKSEVFFQCKSPFILVGSSRRVCQADGTWSGIQPTCIDPAHNTCPDPGTPHFGIQNSSRGYEVGSTVFFRCRKGYHIQGSTTRTCLANLTWSGIQTECIPHACRQPETPAHADVRAIDLPTFGYTLVYTCHPGFFLAGGSEHRTCKADMKWTGKSPVCKSKGVREVNETVTKTPVPSDVFFVNSLWKGYYEYLGKRQPATLTVDWFNATSSKVNATFSEASPVELKLTGIYKKEEAHLLLKAFQIKGQADIFVSKFENDNWGLDGYVSSGLERGGFTFQGDIHGKDFGKFKLERQDPLNPDQDSSSHYHGTSSGSVAAAILVPFFALILSGFAFYLYKHRTRPKVQYNGYAGHENSNGQASFENPMYDTNLKPTEAKAVRFDTTLNTVCTVV

SEQ ID NO: 27290 - protein, 1536 aa, Artificial Sequence; identical to SEQ ID NO: 27289
  Synthetic polypeptide

SEQ ID NO: 27291 - protein, 1536 aa, Artificial Sequence; identical to SEQ ID NO: 27289
  Synthetic polypeptide

SEQ ID NO: 27292 - protein, 1713 aa, Artificial Sequence
  Synthetic polypeptide
GRVRWLMPVKPALWEAEAGGSRGTTVPALLNSTSNQLYLHFQSDISVAAAGFHLEYKTVGLAACQEPALPSNSIKIGDRYMVNDVLSFQCEPGYTLQGRSHISCMPGTVRRWNYPSPLCIATCGGTLSTLGGVILSPGFPGSYPNNLDCTWRISLPIGYGAHIQFLNFSTEANHDFLEIQNGPYHTSPMIGQFSGTDLPAALLSTTHETLIHFYSDHSQNRQGFKLAYQAYELQNCPDPPPFQNGYMINSDYSVGQSVSFECYPGYILIGHPVLTCQHGINRNWNYPFPRCDAPCGYNVTSQNGTIYSPGFPDEYPILKDCIWLITVPPGHGVYINFTLLQTEAVNDYIAVWDGPDQNSPQLGVFSGNTALETAYSSTNQVLLKFHSDFSNGGFFVLNFHAFQLKKCQPPPAVPQAEMLTEDDDFEIGDFVKYQCHPGYTLVGTDILTCKLSSQLQFEGSLPTCEAQCPANEVRTGSSGVILSPGYPGNYFNSQTCSWSIKVEPNYNITIFVDTFQSEKQFDALEVFDGSSGQSPLLVVLSGNHTEQSNFTSRSNQLYLRWSTDHATSKKGFKIRYAAPYCSLTHPLKNGGILNRTAGAVGSKVHYFCKPGYRMVGHSNATCRRNPLGMYQWDSLTPLCQAVSCGIPESPGNGSFTGNEFTLDSKVVYECHEGFKLESSQQATAVCQEDGLWSNKGKPPTCKPVACPSIEAQLSEHVIWRLVSGSLNEYGAQVLLSCSPGYYLEGWRLLRCQANGTWNIGDERPSCRVISCGSLSFPPNGNKIGTLTVYGATAIFTCNTGYTLVGSHVRECLANGLWSGSETRCLAGHCGSPDPIVNGHISGDGFSYRDTVVYQCNPGFRLVGTSVRICLQDHKWSGQTPVCVPITCGHPGNPAHGFTNGSEFNLNDVVNFTCNTGYLLQGVSRAQCRSNGQWSSPLPTCRVVNCSDPGFVENAIRHGQQNFPESFEYGMSILYHCKKGFYLLGSSALTCMANGLWDRSLPKCLAISCGHPGVPANAVLTGELFTYGAVVHYSCRGSESLIGNDTRVCQEDSHWSGALPHCTGNNPGFCGDPGTPAHGSRLGDDFKTKSLLRFSCEMGHQLRGSPERTCLLNGSWSGLQPVCEAVSCGNPGTPTNGMIVSSDGILFSSSVIYACWEGYKTSGLMTRHCTANGTWTGTAPDCTIISCGDPGTLANGIQFGTDFTFNKTVSYQCNPGYVMEAVTSATIRCTKDGRWNPSKPVCKAVLCPQPPPVQNGTVEGSDFRWGSSISYSCMDGYQLSHSAILSCEGRGVWKGEIPQCLPVFCGDPGIPAEGRLSGKSFTYKSEVFFQCKSPFILVGSSRRVCQADGTWSGIQPTCIDPAHNTCPDPGTPHFGIQNSSRGYEVGSTVFFRCRKGYHIQGSTTRTCLANLTWSGIQTECIPHACRQPETPAHADVRAIDLPTFGYTLVYTCHPGFFLAGGSEHRTCKADMKWTGKSPVCKSKGVREVNETVTKTPVPSDVFFVNSLWKGYYEYLGKRQPATLTVDWFNATSSKVNATFSEASPVELKLTGIYKKEEAHLLLKAFQIKGQADIFVSKFENDNWGLDGYVSSGLERGGFTFQGDIHGKDFGKFKLERQDPLNPDQDSSSHYHGTSSGSVAAAILVPFFALILSGFAFYLYKHRTRPKVQYNGYAGHENSNGQASFENPMYDTNLKPTEAKAVRFDTTLNTVCTVV

SEQ ID NO: 27293 - protein, 1713 aa, Artificial Sequence; identical to SEQ ID NO: 27292
  Synthetic polypeptide

SEQ ID NO: 27294 - protein, 1713 aa, Artificial Sequence; identical to SEQ ID NO: 27292
  Synthetic polypeptide

SEQ ID NO: 27295 - protein, 258 aa, Artificial Sequence
  Synthetic polypeptide
GRVRWLMPVKPALWEAEAGGSRGTTVPALLNSTSNQLYLHFQSDISVAAAGFHLEYKTVGLAACQEPALPSNSIKIGDRYMVNDVLSFQCEPGYTLQGRSHISCMPGTVRRWNYPSPLCIATCGGTLSTLGGVILSPGFPGSYPNNLDCTWRISLPIGYGAHIQFLNFSTEANHDFLEIQNGPYHTSPMIGQFSGTDLPAALLSTTHETLIHFYSDHSQNRQGFKLAYQGGSGNIGPAFPCLDTPFQARCQGEERTFN

SEQ ID NO: 27296 - protein, 500 aa, Artificial Sequence
  Synthetic polypeptide
KREFHYRPPRLDHCYSMDDSEDTSWDFGPQAFKLLSAVDILGEKFGIGLPILFLRGSNSQRLADQYRRHSLFGTGKDQTESWWKAFSRQLITEGFLVEVSRYNKFMKICALTKKGRNWLHKANTESQSLILQANEELCPKKLLLPSSKTVSSGTKEHCYNQVPVELSTEKKSNLEKLYSYKPCDKISSGSNISKKSIMVQSPEKAYSSSQPVISAQEQETQIVLYGKLVEARQKHANKMDVPPAILATNKILVDMAKMRPTTVENVKRIDGVSEGKAAMLAPLLEVIKHFCQTNSVQTDLFSSTKPQEEQKTSLVAKNKICTLSQSMAITYSLFQEKKMPLKSIAESRILPLMTIGMHLSQAVKAGCPLDLERAGLTPEVQKIIADVIRNPPVNSDMSKISLIRMLVPENIDTYLIHMAIEILKHGPDSGLQPSCDVNKRRCFPGSEEICSSSKRSKEEVGINTETSSAERKRRLPVWFAKGSDTSKKLMDKTKRGGLFS

SEQ ID NO: 27297 - protein, 61 aa, Artificial Sequence
  Synthetic polypeptide
YKLLTRLTEREKTQKTNTRNERGNFTTDLPDWIIAIPWMTQRIHPGTLVHKHLSFCLLWTS

SEQ ID NO: 27298 - protein, 31 aa, Artificial Sequence
  Synthetic polypeptide
RKEKRHRRPIPGMKEGISLQTSQIGSLLFHG

SEQ ID NO: 27299 - protein, 17 aa, Artificial Sequence
  Synthetic polypeptide
CSSKFQGCGGVARGLQI

SEQ ID NO: 27300 - protein, 35 aa, Artificial Sequence
  Synthetic polypeptide
SRWKHRERTDTEASWSSAHLSSRDAGEWPGDFRYE

SEQ ID NO: 27301 - protein, 117 aa, Artificial Sequence
  Synthetic polypeptide
VPGMRGSGQGTSDMSKISLIRMLVPENIDTYLIHMAIEILKHGPDSGLQPSCDVNKRRCFPGSEEICSSSKRSKEEVGINTETSSAERKRRLPVWFAKGSDTSKKLMDKTKRGGLFS

SEQ ID NO: 27302 - protein, 11 aa, Artificial Sequence
  Synthetic polypeptide
DGDEPGQHGSV

SEQ ID NO: 27303 - protein, 35 aa, Artificial Sequence
  Synthetic polypeptide
AHEMEMSLDNMGQFEKEDRAHCGVSMEMWSLVTNL

SEQ ID NO: 27304 - protein, 854 aa, Artificial Sequence
  Synthetic polypeptide
AWTTWVSLKRRIELTVEYPWRCGALSPTSNCRTGMWSWKCLLFWAVLVTATLCTARPSPTLPEQAQPWGAPVEVESFLVHPGDLLQLRCRLRDDVQSINWLRDGVQLAESNRTRITGEEVEVQDSVPADSGLYACVTSSPSGSDTTYFSVNVSDALPSSEDDDDDDDSSSEEKETDNTKPNPVAPYWTSPEKMEKKLHAVPAAKTVKFKCPSSGTPNPTLRWLKNGKEFKPDHRIGGYKVRYATWSIIMDSVVPSDKGNYTCIVENEYGSINHTYQLDVVERSPHRPILQAGLPANKTVALGSNVEFMCKVYSDPQPHIQWLKHIEVNGSKIGPDNLPYVQILKTAGVNTTDKEMEVLHLRNVSFEDAGEYTCLAGNSIGLSHHSAWLTVLEALEERPAVMTSPLYLEIIIYCTGAFLISCMVGSVIVYKMKSGTKKSDFHSQMAVHKLAKSIPLRRQVTVSADSSASMNSGVLLVRPSRLSSSGTPMLAGVSEYELPEDPRWELPRDRLVLGKPLGEGCFGQVVLAEAIGLDKDKPNRVTKVAVKMLKSDATEKDLSDLISEMEMMKMIGKHKNIINLLGACTQDGPLYVIVEYASKGNLREYLQARRPPGLEYCYNPSHNPEEQLSSKDLVSCAYQVARGMEYLASKKCIHRDLAARNVLVTEDNVMKIADFGLARDIHHIDYYKKTTNGRLPVKWMAPEALFDRIYTHQSDVWSFGVLLWEIFTLGGSPYPGVPVEELFKLLKEGHRMDKPSNCTNELYMMMRDCWHAVPSQRPTFKQLVEDLDRIVALTSNQEYLDLSMPLDQYSPSFPDTRSSTCSSGEDSVFSHEPLPEEPCLPRHPAQLANGGLKRR

SEQ ID NO: 27305 - protein, 24 aa, Artificial Sequence
  Synthetic polypeptide
VNSTQTKILIVYLCKLQFRRKYGQ

SEQ ID NO: 27306 - protein, 24 aa, Artificial Sequence
  Synthetic polypeptide
VNSTQTKILIVYLCKLQFRRKYGQ

SEQ ID NO: 27307 - protein, 24 aa, Artificial Sequence
  Synthetic polypeptide
VNSTQTKILIVYLCKLQFRRKYGQ

SEQ ID NO: 27308 - protein, 24 aa, Artificial Sequence
  Synthetic polypeptide
VNSTQTKILIVYLCKLQFRRKYGQ

SEQ ID NO: 27309 - protein, 7 aa, Artificial Sequence
  Synthetic polypeptide
TLHRPRF

SEQ ID NO: 27310 - protein, 7 aa, Artificial Sequence
  Synthetic polypeptide
TLHRPRF

SEQ ID NO: 27311 - protein, 7 aa, Artificial Sequence
  Synthetic polypeptide
TLHRPRF

SEQ ID NO: 27312 - protein, 7 aa, Artificial Sequence
  Synthetic polypeptide
TLHRPRF

SEQ ID NO: 27313 - protein, 774 aa, Artificial Sequence
  Synthetic polypeptide
WPVQGAHSPLGRGLQYFPVWRRAQSPCCGSLKVRNRDPPSMMNKPRLSAMQERNKRAAWEKGAHIPQRLGKLYTDQDFDSLPVQITVPEKIRSIIKEGIESQASYKIVIEGKPYTVNLMQKNFLPHNFRVYSYSGTGIMKPLDQDFQNFCHYQGYIEGYPKSVVMVSTCTGLRGVLQFENVSYGIEPLESSVGFEHVIYQVKHKKADVSLYNEKDIESRDLSFKLQSVEYNHMGSDTTVVAQKVFQLIGLTNAIFVSFNITIILSSLELWIDENKIATTGEANELLHTFLRWKTSYLVLRPHDVAFLLVYREKSNYVGATFQGKMCDANYAGGVVLHPRTISLESLAVILAQLLSLSMGITYDDINKCQCSGAVCIMNPEAIHFSGVKIFSNCSFEDFAHFISKQKSQCLHNQPRLDPFFKQQAVCGNAKLEAGEECDCGTEQDCALIGETCCDIATCRFKAGSNCAEGPCCENCLFMSKERMCRPSFEECDLPEYCNGSSASCPENHYVQTGHPCGLNQWICIDGVCMSGDKQCTDTFGKEVEFGPSECYSHLNSKTDVSGNCGISDSGYTQCEADNLQCGKLICKYVGKFLLQIPRATIIYANISGHLCIAVEFASDHADSQKMWIKDGTSCGSNKVCRNQRCVSSSYLGYDCTTDKCNDRGVCNNKKHCHCSASYLPPDCSVQSDLWPGGSIDSGNFPPVAIPARLPERRYIENIYHSKPMRWPFFLFIPFFIIFCVLIAIMVKVNFQRKKWRTEDYSSDEQPESESEPKG

SEQ ID NO: 27314 - protein, 637 aa, Artificial Sequence
  Synthetic polypeptide
WPVQGAHSPLGRGLQYFPVWRRAQSPCCGSLKVRNRDPPSMMNKPRLSAMQERNKRAAWEKGAHIPQRLGKLYTDQDFDSLPVQITVPEKIRSIIKEGIESQASYKIVIEGKPYTVNLMQKNFLPHNFRVYSYSGTGIMKPLDQDFQNFCHYQGYIEGYPKSVVMVSTCTGLRGVLQFENVSYGIEPLESSVGFEHVIYQVKHKKADVSLYNEKDIESRDLSFKLQSVEHPRTISLESLAVILAQLLSLSMGITYDDINKCQCSGAVCIMNPEAIHFSGVKIFSNCSFEDFAHFISKQKSQCLHNQPRLDPFFKQQAVCGNAKLEAGEECDCGTEQDCALIGETCCDIATCRFKAGSNCAEGPCCENCLFMSKERMCRPSFEECDLPEYCNGSSASCPENHYVQTGHPCGLNQWICIDGVCMSGDKQCTDTFGKEVEFGPSECYSHLNSKTDVSGNCGISDSGYTQCEADGHLCIAVEFASDHADSQKMWIKDGTSCGSNKVCRNQRCVSSSYLGYDCTTDKCNDRGVCNNKKHCHCSASYLPPDCSVQSDLWPGGSIDSGNFPPVAIPARLPERRYIENIYHSKPMRWPFFLFIPFFIIFCVLIAIMVKVNFQRKKWRTEDYSSDEQPESESEPKG

SEQ ID NO: 27315 - protein, 793 aa, Artificial Sequence
  Synthetic polypeptide
WPVQGAHSPLGRGLQYFPVWRRAQSPCCGSLKVRNRDPPSMMNKPRLSAMQERNKRAAWEKGAHIPQRLGKLYTDQDFDSLPVQITVPEKIRSIIKEGIESQASYKIVIEGKPYTVNLMQKNFLPHNFRVYSYSGTGIMKPLDQDFQNFCHYQGYIEGYPKSVVMVSTCTGLRGVLQFENVSYGIEPLESSVGFEHVIYQVKHKKADVSLYNEKDIESRDLSFKLQSVEPQQDFAKYIEMHVIVEKQLYNHMGSDTTVVAQKVFQLIGLTNAIFVSFNITIILSSLELWIDENKIATTGEANELLHTFLRWKTSYLVLRPHDVAFLLVYREKSNYVGATFQGKMCDANYAGGVVLHPRTISLESLAVILAQLLSLSMGITYDDINKCQCSGAVCIMNPEAIHFSGVKIFSNCSFEDFAHFISKQKSQCLHNQPRLDPFFKQQAVCGNAKLEAGEECDCGTEQDCALIGETCCDIATCRFKAGSNCAEGPCCENCLFMSKERMCRPSFEECDLPEYCNGSSASCPENHYVQTGHPCGLNQWICIDGVCMSGDKQCTDTFGKEVEFGPSECYSHLNSKTDVSGNCGISDSGYTQCEADNLQCGKLICKYVGKFLLQIPRATIIYANISGHLCIAVEFASDHADSQKMWIKDGTSCGSNKVCRNQRCVSSSYLGYDCTTDKCNDRGVCNNKKHCHCSASYLPPDCSVQSDLWPGGSIDSGNFPPVAIPARLPERRYIENIYHSKPMRWPFFLFIPFFIIFCVLIAIMVKVNFQRKKWRTEDYSSDEQPESESEPKG

SEQ ID NO: 27316 - protein, 730 aa, Artificial Sequence
  Synthetic polypeptide
WPVQGAHSPLGRGLQYFPVWRRAQSPCCGSLKVRNRDPPSMMNKPRLSAMQERNKRAAWEKGAHIPQRLGKLYTDQDFDSLPVQITVPEKIRSIIKEGIESQASYKIVIEGKPYTVNLMQKNFLPHNFRVYSYSGTGIMKPLDQDFQNFCHYQGYIEGYPKSVVMVSTCTGLRGVLQFENVSYGIEPLESSVGFEHVIYQVKHKKADVSLYNEKDIESRDLSFKLQSVEPQQDFAKYIEMHVIVEKQLYNHMGSDTTVVAQKVFQLIGLTNAIFVSFNITIILSSLELWIDENKIATTGEANELLHTFLRWKTSYLVLRPHDVAFLLVYREKSNYVGATFQGKMCDANYAGGVVLHPRTISLESLAVILAQLLSLSMGITYDDINKCQCSGAVCIMNPEAIHFSGVKIFSNCSFEDFAHFISKQKSQCLHNQPRLDPFFKQQAVCGNAKLEAGEECDCGTEQDCALIGETCCDIATCRFKAGSNCAEGPCCENCLFMSKERMCRPSFEECDLPEYCNGSSASCPENHYVQTGHPCGLNQWICIDGVCMSGDKQCTDTFGKEVEFGPSECYSHLNSKTDVSGNCGISDSGYTQCEVCRNQRCVSSSYLGYDCTTDKCNDRGVCNNKKHCHCSASYLPPDCSVQSDLWPGGSIDSGNFPPVAIPARLPERRYIENIYHSKPMRWPFFLFIPFFIIFCVLIAIMVKVNFQRKKWRTEDYSSDEQPESESEPKG

SEQ ID NO: 27317 - protein, 34 aa, Artificial Sequence
  Synthetic polypeptide
GGPYREPILLWGGVSSTFPCGGAPSHLVAVASRF

SEQ ID NO: 27318 - protein, 34 aa, Artificial Sequence; identical to SEQ ID NO: 27317
  Synthetic polypeptide

SEQ ID NO: 27319 - protein, 34 aa, Artificial Sequence; identical to SEQ ID NO: 27317
  Synthetic polypeptide

SEQ ID NO: 27320 - protein, 34 aa, Artificial Sequence; identical to SEQ ID NO: 27317
  Synthetic polypeptide

SEQ ID NO: 27321 - protein, 700 aa, Artificial Sequence
  Synthetic polypeptide
PQDFDSLPVQITVPEKIRSIIKEGIESQASYKIVIEGKPYTVNLMQKNFLPHNFRVYSYSGTGIMKPLDQDFQNFCHYQGYIEGYPKSVVMVSTCTGLRGVLQFENVSYGIEPLESSVGFEHVIYQVKHKKADVSLYNEKDIESRDLSFKLQSVEYNHMGSDTTVVAQKVFQLIGLTNAIFVSFNITIILSSLELWIDENKIATTGEANELLHTFLRWKTSYLVLRPHDVAFLLVYREKSNYVGATFQGKMCDANYAGGVVLHPRTISLESLAVILAQLLSLSMGITYDDINKCQCSGAVCIMNPEAIHFSGVKIFSNCSFEDFAHFISKQKSQCLHNQPRLDPFFKQQAVCGNAKLEAGEECDCGTEQDCALIGETCCDIATCRFKAGSNCAEGPCCENCLFMSKERMCRPSFEECDLPEYCNGSSASCPENHYVQTGHPCGLNQWICIDGVCMSGDKQCTDTFGKEVEFGPSECYSHLNSKTDVSGNCGISDSGYTQCEADNLQCGKLICKYVGKFLLQIPRATIIYANISGHLCIAVEFASDHADSQKMWIKDGTSCGSNKVCRNQRCVSSSYLGYDCTTDKCNDRGVCNNKKHCHCSASYLPPDCSVQSDLWPGGSIDSGNFPPVAIPARLPERRYIENIYHSKPMRWPFFLFIPFFIIFCVLIAIMVKVNFQRKKWRTEDYSSDEQPESESEPKG

SEQ ID NO: 27322 - protein, 49 aa, Artificial Sequence
  Synthetic polypeptide
WPVQGAHSPLGRGLQYFPVWRRAQSPCCGSLKILIVYLCKLQFRRKYGQ

SEQ ID NO: 27323 - protein, 49 aa, Artificial Sequence; identical to SEQ ID NO: 27322
  Synthetic polypeptide

SEQ ID NO: 27324 - protein, 49 aa, Artificial Sequence; identical to SEQ ID NO: 27322
  Synthetic polypeptide

SEQ ID NO: 27325 - protein, 49 aa, Artificial Sequence; identical to SEQ ID NO: 27322
  Synthetic polypeptide

SEQ ID NO: 27326 - protein, 563 aa, Artificial Sequence
  Synthetic polypeptide
PQDFDSLPVQITVPEKIRSIIKEGIESQASYKIVIEGKPYTVNLMQKNFLPHNFRVYSYSGTGIMKPLDQDFQNFCHYQGYIEGYPKSVVMVSTCTGLRGVLQFENVSYGIEPLESSVGFEHVIYQVKHKKADVSLYNEKDIESRDLSFKLQSVEHPRTISLESLAVILAQLLSLSMGITYDDINKCQCSGAVCIMNPEAIHFSGVKIFSNCSFEDFAHFISKQKSQCLHNQPRLDPFFKQQAVCGNAKLEAGEECDCGTEQDCALIGETCCDIATCRFKAGSNCAEGPCCENCLFMSKERMCRPSFEECDLPEYCNGSSASCPENHYVQTGHPCGLNQWICIDGVCMSGDKQCTDTFGKEVEFGPSECYSHLNSKTDVSGNCGISDSGYTQCEADGHLCIAVEFASDHADSQKMWIKDGTSCGSNKVCRNQRCVSSSYLGYDCTTDKCNDRGVCNNKKHCHCSASYLPPDCSVQSDLWPGGSIDSGNFPPVAIPARLPERRYIENIYHSKPMRWPFFLFIPFFIIFCVLIAIMVKVNFQRKKWRTEDYSSDEQPESESEPKG

SEQ ID NO: 27327 - protein, 719 aa, Artificial Sequence
  Synthetic polypeptide
PQDFDSLPVQITVPEKIRSIIKEGIESQASYKIVIEGKPYTVNLMQKNFLPHNFRVYSYSGTGIMKPLDQDFQNFCHYQGYIEGYPKSVVMVSTCTGLRGVLQFENVSYGIEPLESSVGFEHVIYQVKHKKADVSLYNEKDIESRDLSFKLQSVEPQQDFAKYIEMHVIVEKQLYNHMGSDTTVVAQKVFQLIGLTNAIFVSFNITIILSSLELWIDENKIATTGEANELLHTFLRWKTSYLVLRPHDVAFLLVYREKSNYVGATFQGKMCDANYAGGVVLHPRTISLESLAVILAQLLSLSMGITYDDINKCQCSGAVCIMNPEAIHFSGVKIFSNCSFEDFAHFISKQKSQCLHNQPRLDPFFKQQAVCGNAKLEAGEECDCGTEQDCALIGETCCDIATCRFKAGSNCAEGPCCENCLFMSKERMCRPSFEECDLPEYCNGSSASCPENHYVQTGHPCGLNQWICIDGVCMSGDKQCTDTFGKEVEFGPSECYSHLNSKTDVSGNCGISDSGYTQCEADNLQCGKLICKYVGKFLLQIPRATIIYANISGHLCIAVEFASDHADSQKMWIKDGTSCGSNKVCRNQRCVSSSYLGYDCTTDKCNDRGVCNNKKHCHCSASYLPPDCSVQSDLWPGGSIDSGNFPPVAIPARLPERRYIENIYHSKPMRWPFFLFIPFFIIFCVLIAIMVKVNFQRKKWRTEDYSSDEQPESESEPKG

SEQ ID NO: 27328 - protein, 656 aa, Artificial Sequence
  Synthetic polypeptide
PQDFDSLPVQITVPEKIRSIIKEGIESQASYKIVIEGKPYTVNLMQKNFLPHNFRVYSYSGTGIMKPLDQDFQNFCHYQGYIEGYPKSVVMVSTCTGLRGVLQFENVSYGIEPLESSVGFEHVIYQVKHKKADVSLYNEKDIESRDLSFKLQSVEPQQDFAKYIEMHVIVEKQLYNHMGSDTTVVAQKVFQLIGLTNAIFVSFNITIILSSLELWIDENKIATTGEANELLHTFLRWKTSYLVLRPHDVAFLLVYREKSNYVGATFQGKMCDANYAGGVVLHPRTISLESLAVILAQLLSLSMGITYDDINKCQCSGAVCIMNPEAIHFSGVKIFSNCSFEDFAHFISKQKSQCLHNQPRLDPFFKQQAVCGNAKLEAGEECDCGTEQDCALIGETCCDIATCRFKAGSNCAEGPCCENCLFMSKERMCRPSFEECDLPEYCNGSSASCPENHYVQTGHPCGLNQWICIDGVCMSGDKQCTDTFGKEVEFGPSECYSHLNSKTDVSGNCGISDSGYTQCEVCRNQRCVSSSYLGYDCTTDKCNDRGVCNNKKHCHCSASYLPPDCSVQSDLWPGGSIDSGNFPPVAIPARLPERRYIENIYHSKPMRWPFFLFIPFFIIFCVLIAIMVKVNFQRKKWRTEDYSSDEQPESESEPKG

SEQ ID NO: 27329 - protein, 50 aa, Artificial Sequence
  Synthetic polypeptide
FGPVNRTTKTALLFRKLQSGNLGPGKPAEGKIYLIFIMTGCSLLNICLIS

SEQ ID NO: 27330 - protein, 50 aa, Artificial Sequence; identical to SEQ ID NO: 27329
  Synthetic polypeptide

SEQ ID NO: 27331 - protein, 50 aa, Artificial Sequence; identical to SEQ ID NO: 27329
  Synthetic polypeptide

SEQ ID NO: 27332 - protein, 50 aa, Artificial Sequence; identical to SEQ ID NO: 27329
  Synthetic polypeptide

SEQ ID NO: 27333 - protein, 50 aa, Artificial Sequence; identical to SEQ ID NO: 27329
  Synthetic polypeptide

SEQ ID NO: 27334 - protein, 29 aa, Artificial Sequence
  Synthetic polypeptide
TGQPKLLCSSENCSQGTWDPASQQKGKST

SEQ ID NO: 27335 - protein, 29 aa, Artificial Sequence
  Synthetic polypeptide
TGQPKLLCSSENCSQGTWDPASQQKGKST

SEQ ID NO: 27336 - protein, 29 aa, Artificial Sequence
  Synthetic polypeptide
TGQPKLLCSSENCSQGTWDPASQQKGKST

SEQ ID NO: 27337 - protein, 29 aa, Artificial Sequence
  Synthetic polypeptide
TGQPKLLCSSENCSQGTWDPASQQKGKST

SEQ ID NO: 27338 - protein, 29 aa, Artificial Sequence
  Synthetic polypeptide
TGQPKLLCSSENCSQGTWDPASQQKGKST

SEQ ID NO: 27339 - protein, 29 aa, Artificial Sequence
  Synthetic polypeptide
TGQPKLLCSSENCSQGTWDPASQQKGKST

SEQ ID NO: 27340 - protein, 78 aa, Artificial Sequence
  Synthetic polypeptide
WPSEQDNQNCSALPKIAVREPGTRQASRRENLPDFYNDWMFIAKHLPDLIESGQLRERVEKLNMLSIDHLTDHKSQRL

SEQ ID NO: 27341 - protein, 180 aa, Artificial Sequence
  Synthetic polypeptide
WPSEQDNQNCSALPKIAVREPGTRQASRRENLPDFYNDWMFIAKHLPDLIESGQLRERVEKLNMLSIDHLTDHKSQRLARLVLGCITMAYVWGKGHGDVRKVLPRNIAVPYCQLSKKLELPPILVYADCVLANWKKKDPNKPLTYENMDVLFSFRDGDCSKGFFLVSLLVEIAAASAIKV

SEQ ID NO: 27342 - protein, 403 aa, Artificial Sequence
  Synthetic polypeptide
WPSEQDNQNCSALPKIAVREPGTRQASRRENLPDFYNDWMFIAKHLPDLIESGQLRERVEKLNMLSIDHLTDHKSQRLARLVLGCITMAYVWGKGHGDVRKVLPRNIAVPYCQLSKKLELPPILVYADCVLANWKKKDPNKPLTYENMDVLFSFRDGDCSKGFFLVSLLVEIAAASAIKVIPTVFKAMQMQERDTLLKALLEIASCLEKALQVFHQIHDHVNPKAFFSVLRIYLSGWKGNPQLSDGLVYEGFWEDPKEFAGGSAGQSSVFQCFDVLLGIQQTAGGGHAAQFLQDMRRYMPPAHRNFLCSLESNPSVREFVLSKGDAGLREAYDACVKALVSLRSYHLQIVTKYILIPASQQPKENKTSEDPSKLEAKGTGGTDLMNFLKTVRSTTEKSLLKEG

SEQ ID NO: 27343 - protein, 403 aa, Artificial Sequence; identical to SEQ ID NO: 27342
  Synthetic polypeptide

SEQ ID NO: 27344 - protein, 48 aa, Artificial Sequence
  Synthetic polypeptide
FGPVNRTTKTALLFRKLQSGNLGPGKPAEGKIYLIFIMTGCSLLNICL

SEQ ID NO: 27345 - protein, 47 aa, Artificial Sequence
  Synthetic polypeptide
WPSEQDNQNCSALPKIAVREPGTRQASRRENLPDFYNDWMFIAKHLP

SEQ ID NO: 27346 - protein, 170 aa, Artificial Sequence
  Synthetic polypeptide
WPSEQDNQNCSALPKIAVREPGTRQASRRENLPDFYNDWMFIAKHLPDLIESGQLRERVEKLNMLSIDHLTDHKSQRLARLVLGCITMAYVWGKGHGDVRKVLPRNIAVPYCQLSKKLELPPILVYADCVLANWKKKDPNKYVNRTWTFCSHFVMETAVKDSSWSLYWWK

SEQ ID NO: 27347 - protein, 46 aa, Artificial Sequence
  Synthetic polypeptide
NIADSFYVLLYRVKENVCSVKLYRNGKIYLIFIMTGCSLLNICLIS

SEQ ID NO: 27348 - protein, 46 aa, Artificial Sequence; identical to SEQ ID NO: 27347
  Synthetic polypeptide

SEQ ID NO: 27349 - protein, 46 aa, Artificial Sequence; identical to SEQ ID NO: 27347
  Synthetic polypeptide

SEQ ID NO: 27350 - protein, 46 aa, Artificial Sequence; identical to SEQ ID NO: 27347
  Synthetic polypeptide

SEQ ID NO: 27351 - protein, 46 aa, Artificial Sequence; identical to SEQ ID NO: 27347
  Synthetic polypeptide

SEQ ID NO: 27352 - protein, 43 aa, Artificial Sequence
  Synthetic polypeptide
LHWTNVILITFLFKILLILFMFCFTELRKMFVLLSFTEMGKST

SEQ ID NO: 27353 - protein, 43 aa, Artificial Sequence; identical to SEQ ID NO: 27352
  Synthetic polypeptide

SEQ ID NO: 27354 - protein, 43 aa, Artificial Sequence; identical to SEQ ID NO: 27352
  Synthetic polypeptide

SEQ ID NO: 27355 - protein, 43 aa, Artificial Sequence; identical to SEQ ID NO: 27352
  Synthetic polypeptide

SEQ ID NO: 27356 - protein, 43 aa, Artificial Sequence; identical to SEQ ID NO: 27352
  Synthetic polypeptide

SEQ ID NO: 27357 - protein, 43 aa, Artificial Sequence; identical to SEQ ID NO: 27352
  Synthetic polypeptide

SEQ ID NO: 27358 - protein, 54 aa, Artificial Sequence
  Synthetic polypeptide
ALQKWENLPDFYNDWMFIAKHLPDLIESGQLRERVEKLNMLSIDHLTDHKSQRL

SEQ ID NO: 27359 - protein, 156 aa, Artificial Sequence
  Synthetic polypeptide
ALQKWENLPDFYNDWMFIAKHLPDLIESGQLRERVEKLNMLSIDHLTDHKSQRLARLVLGCITMAYVWGKGHGDVRKVLPRNIAVPYCQLSKKLELPPILVYADCVLANWKKKDPNKPLTYENMDVLFSFRDGDCSKGFFLVSLLVEIAAASAIKV

SEQ ID NO: 27360 - protein, 379 aa, Artificial Sequence
  Synthetic polypeptide
ALQKWENLPDFYNDWMFIAKHLPDLIESGQLRERVEKLNMLSIDHLTDHKSQRLARLVLGCITMAYVWGKGHGDVRKVLPRNIAVPYCQLSKKLELPPILVYADCVLANWKKKDPNKPLTYENMDVLFSFRDGDCSKGFFLVSLLVEIAAASAIKVIPTVFKAMQMQERDTLLKALLEIASCLEKALQVFHQIHDHVNPKAFFSVLRIYLSGWKGNPQLSDGLVYEGFWEDPKEFAGGSAGQSSVFQCFDVLLGIQQTAGGGHAAQFLQDMRRYMPPAHRNFLCSLESNPSVREFVLSKGDAGLREAYDACVKALVSLRSYHLQIVTKYILIPASQQPKENKTSEDPSKLEAKGTGGTDLMNFLKTVRSTTEKSLLKEG

SEQ ID NO: 27361 - protein, 379 aa, Artificial Sequence; identical to SEQ ID NO: 27360
  Synthetic polypeptide

SEQ ID NO: 27362 - protein, 44 aa, Artificial Sequence
  Synthetic polypeptide
NIADSFYVLLYRVKENVCSVKLYRNGKIYLIFIMTGCSLLNICL

SEQ ID NO: 27363 - protein, 23 aa, Artificial Sequence
  Synthetic polypeptide
ALQKWENLPDFYNDWMFIAKHLP

SEQ ID NO: 27364 - protein, 146 aa, Artificial Sequence
  Synthetic polypeptide
ALQKWENLPDFYNDWMFIAKHLPDLIESGQLRERVEKLNMLSIDHLTDHKSQRLARLVLGCITMAYVWGKGHGDVRKVLPRNIAVPYCQLSKKLELPPILVYADCVLANWKKKDPNKYVNRTWTFCSHFVMETAVKDSSWSLYWWK

SEQ ID NO: 27365 - protein, 32 aa, Artificial Sequence
  Synthetic polypeptide
YPKYTVHIMGLWKIYLIFIMTGCSLLNICLIS

SEQ ID NO: 27366 - protein, 32 aa, Artificial Sequence; identical to SEQ ID NO: 27365
  Synthetic polypeptide

SEQ ID NO: 27367 - protein, 32 aa, Artificial Sequence; identical to SEQ ID NO: 27365
  Synthetic polypeptide

SEQ ID NO: 27368 - protein, 32 aa, Artificial Sequence; identical to SEQ ID NO: 27365
  Synthetic polypeptide

SEQ ID NO: 27369 - protein, 32 aa, Artificial Sequence; identical to SEQ ID NO: 27365
  Synthetic polypeptide

SEQ ID NO: 27370 - protein, 7 aa, Artificial Sequence
  Synthetic polypeptide
WACGKST

SEQ ID NO: 27371 - protein, 7 aa, Artificial Sequence
  Synthetic polypeptide
WACGKST

SEQ ID NO: 27372 - protein, 7 aa, Artificial Sequence
  Synthetic polypeptide
WACGKST

SEQ ID NO: 27373 - protein, 7 aa, Artificial Sequence
  Synthetic polypeptide
WACGKST

SEQ ID NO: 27374 - protein, 7 aa, Artificial Sequence
  Synthetic polypeptide
WACGKST

SEQ ID NO: 27375 - protein, 7 aa, Artificial Sequence
  Synthetic polypeptide
WACGKST

SEQ ID NO: 27376 - protein, 58 aa, Artificial Sequence
  Synthetic polypeptide
IHGSHNGLVENLPDFYNDWMFIAKHLPDLIESGQLRERVEKLNMLSIDHLTDHKSQRL

SEQ ID NO: 27377 - protein, 160 aa, Artificial Sequence
  Synthetic polypeptide
IHGSHNGLVENLPDFYNDWMFIAKHLPDLIESGQLRERVEKLNMLSIDHLTDHKSQRLARLVLGCITMAYVWGKGHGDVRKVLPRNIAVPYCQLSKKLELPPILVYADCVLANWKKKDPNKPLTYENMDVLFSFRDGDCSKGFFLVSLLVEIAAASAIKV

SEQ ID NO: 27378 - protein, 383 aa, Artificial Sequence
  Synthetic polypeptide
IHGSHNGLVENLPDFYNDWMFIAKHLPDLIESGQLRERVEKLNMLSIDHLTDHKSQRLARLVLGCITMAYVWGKGHGDVRKVLPRNIAVPYCQLSKKLELPPILVYADCVLANWKKKDPNKPLTYENMDVLFSFRDGDCSKGFFLVSLLVEIAAASAIKVIPTVFKAMQMQERDTLLKALLEIASCLEKALQVFHQIHDHVNPKAFFSVLRIYLSGWKGNPQLSDGLVYEGFWEDPKEFAGGSAGQSSVFQCFDVLLGIQQTAGGGHAAQFLQDMRRYMPPAHRNFLCSLESNPSVREFVLSKGDAGLREAYDACVKALVSLRSYHLQIVTKYILIPASQQPKENKTSEDPSKLEAKGTGGTDLMNFLKTVRSTTEKSLLKEG

SEQ ID NO: 27379 - protein, 383 aa, Artificial Sequence; identical to SEQ ID NO: 27378
  Synthetic polypeptide

SEQ ID NO: 27380 - protein, 30 aa, Artificial Sequence
  Synthetic polypeptide
YPKYTVHIMGLWKIYLIFIMTGCSLLNICL

SEQ ID NO: 27381 - protein, 27 aa, Artificial Sequence
  Synthetic polypeptide
IHGSHNGLVENLPDFYNDWMFIAKHLP

SEQ ID NO: 27382 - protein, 150 aa, Artificial Sequence
  Synthetic polypeptide
IHGSHNGLVENLPDFYNDWMFIAKHLPDLIESGQLRERVEKLNMLSIDHLTDHKSQRLARLVLGCITMAYVWGKGHGDVRKVLPRNIAVPYCQLSKKLELPPILVYADCVLANWKKKDPNKYVNRTWTFCSHFVMETAVKDSSWSLYWWK

SEQ ID NO: 27383 - protein, 69 aa, Artificial Sequence
  Synthetic polypeptide
SQLLGRLKQENSLNPGGRCGSETRLCHCTPAWATENMDVLFSFRDGDCSKGFFLVSLLVEIAAASAIKV

SEQ ID NO: 27384 - protein, 47 aa, Artificial Sequence
  Synthetic polypeptide
TQEADVAVRRDCAIALQPGRQRTWTFCSHFVMETAVKDSSWSLYWWK

SEQ ID NO: 27385 - protein, 47 aa, Artificial Sequence; identical to SEQ ID NO: 27384
  Synthetic polypeptide

SEQ ID NO: 27386 - protein, 47 aa, Artificial Sequence; identical to SEQ ID NO: 27384
  Synthetic polypeptide

SEQ ID NO: 27387 - protein, 47 aa, Artificial Sequence; identical to SEQ ID NO: 27384
  Synthetic polypeptide

SEQ ID NO: 27388 - protein, 22 aa, Artificial Sequence
  Synthetic polypeptide
DEIVPLHSSLGDREHGRFVLIS

SEQ ID NO: 27389 - protein, 22 aa, Artificial Sequence
  Synthetic polypeptide
DEIVPLHSSLGDREHGRFVLIS

SEQ ID NO: 27390 - protein, 22 aa, Artificial Sequence
  Synthetic polypeptide
DEIVPLHSSLGDREHGRFVLIS

SEQ ID NO: 27391 - protein, 22 aa, Artificial Sequence
  Synthetic polypeptide
DEIVPLHSSLGDREHGRFVLIS

SEQ ID NO: 27392 - protein, 292 aa, Artificial Sequence
  Synthetic polypeptide
SQLLGRLKQENSLNPGGRCGSETRLCHCTPAWATENMDVLFSFRDGDCSKGFFLVSLLVEIAAASAIKVIPTVFKAMQMQERDTLLKALLEIASCLEKALQVFHQIHDHVNPKAFFSVLRIYLSGWKGNPQLSDGLVYEGFWEDPKEFAGGSAGQSSVFQCFDVLLGIQQTAGGGHAAQFLQDMRRYMPPAHRNFLCSLESNPSVREFVLSKGDAGLREAYDACVKALVSLRSYHLQIVTKYILIPASQQPKENKTSEDPSKLEAKGTGGTDLMNFLKTVRSTTEKSLLKEG

SEQ ID NO: 27393 - protein, 292 aa, Artificial Sequence; identical to SEQ ID NO: 27392
  Synthetic polypeptide

SEQ ID NO: 27394 - protein, 61 aa, Artificial Sequence
  Synthetic polypeptide
SQLLGRLKQENSLNPGGRCGSETRLCHCTPAWATENMDVLFSFRDGDCSKGFFLVSLLVEI

SEQ ID NO: 27395 - protein, 337 aa, Artificial Sequence
  Synthetic polypeptide
KCGPEKKKTEDYFGVCSEPVIKDNVVVVYEVLEEMLDNGFPLATESNILKELIKPPTILRTVVNTITGSTNVGDQLPTGQLSVVPWRRTGVKYTNNEAYFDVIEEIDAIIDKSGSTITAEIQGVIDACVKLTGMPDLTLSFMNPRLLDDVSFHPCVRFKRWESERILSFIPPDGNFRLLSYHVSAQNLVAIPVYVKHNISFRDSSSLGRFEITVGPKQTMGKTIEGVTVTSQMPKGVLNMSLTPSQGTHTFDPVTKMLSWDVGKINPQKLPSLKGTMSLQAGASKPDENPTINLQFKIQQLAISGLKVNRLDMYGEKYKPFKGIKYMTKAGKFQVRT

SEQ ID NO: 27396 - protein, 337 aa, Artificial Sequence; identical to SEQ ID NO: 27395
  Synthetic polypeptide

SEQ ID NO: 27397 - protein, 337 aa, Artificial Sequence; identical to SEQ ID NO: 27395
  Synthetic polypeptide

SEQ ID NO: 27398 - protein, 35 aa, Artificial Sequence
  Synthetic polypeptide
NNLETIPYHEQRKYLESVALRRKKLRIILESVQSQ

SEQ ID NO: 27399 - protein, 35 aa, Artificial Sequence; identical to SEQ ID NO: 27398
  Synthetic polypeptide

SEQ ID NO: 27400 - protein, 35 aa, Artificial Sequence; identical to SEQ ID NO: 27398
  Synthetic polypeptide

SEQ ID NO: 27401 - protein, 35 aa, Artificial Sequence; identical to SEQ ID NO: 27398
  Synthetic polypeptide

SEQ ID NO: 27402 - protein, 35 aa, Artificial Sequence; identical to SEQ ID NO: 27398
  Synthetic polypeptide

SEQ ID NO: 27403 - protein, 35 aa, Artificial Sequence; identical to SEQ ID NO: 27398
  Synthetic polypeptide

SEQ ID NO: 27404 - protein, 35 aa, Artificial Sequence; identical to SEQ ID NO: 27398
  Synthetic polypeptide

SEQ ID NO: 27405 - protein, 192 aa, Artificial Sequence
  Synthetic polypeptide
KCGPEKKKTEDYFGVCSEPVIKDNVVVVYEVLEEMLDNGFPLATESNILKELIKPPTILRTVVNTITGSTNVGDQLPTGQLSVVPWRRTGVKYTNNEAYFDVIEEIDAIIDKSGSTITAEIQGVIDACVKLTGMPDLTLSFMNPRLLDDVSFHPCVRFKRWESERILSFIPPDGNFRLLSYHVSAQKCCLGM

SEQ ID NO: 27406 - protein, 58 aa, Artificial Sequence
  Synthetic polypeptide
KCGPEKKKTEDYFGVCSEPVIKDNVVVVYEVLEEMLDNGFPLATESNILKELIKPPTI

SEQ ID NO: 27407 - protein, 187 aa, Artificial Sequence
  Synthetic polypeptide
KCGPEKKKTEDYFGVCSEPVIKDNVVVVYEVLEEMLDNGFPLATESNILKELIKPPTILRTVVNTITGSTNVGDQLPTGQLSVVPWRRTGVKYTNNEAYFDVIEEIDAIIDKSGSTITAEIQGVIDACVKLTGMPDLTLSFMNPRLLDDVSFHPCVRFKRWESERILSFIPPDGNFRLLSYHVSAQK

SEQ ID NO: 27408 - protein, 141 aa, Artificial Sequence
  Synthetic polypeptide
KCGPEKKKTEDYFGVCSEPVIKDNVVVVYEVLEEMLDNGFPLATESNILKELIKPPTILRTVVNTITGSTITAEIQGVIDACVKLTGMPDLTLSFMNPRLLDDVSFHPCVRFKRWESERILSFIPPDGNFRLLSYHVSAQK

SEQ ID NO: 27409 - protein, 50 aa, Artificial Sequence
  Synthetic polypeptide
ACAAEESAASGAKGDLAASDRCHSANEGGERPQAPQNPAGLCGPLVCAGL

SEQ ID NO: 27410 - protein, 50 aa, Artificial Sequence; identical to SEQ ID NO: 27409
  Synthetic polypeptide

SEQ ID NO: 27411 - protein, 50 aa, Artificial Sequence; identical to SEQ ID NO: 27409
  Synthetic polypeptide

SEQ ID NO: 27412 - protein, 50 aa, Artificial Sequence; identical to SEQ ID NO: 27409
  Synthetic polypeptide

SEQ ID NO: 27413 - protein, 50 aa, Artificial Sequence; identical to SEQ ID NO: 27409
  Synthetic polypeptide

SEQ ID NO: 27414 - protein, 262 aa, Artificial Sequence
  Synthetic polypeptide
MTELVQLKSLLLLEQREIWLLVTDVTLQTKEERDPRLPKTLLVYVAPLCVLGSEVLEALAGAAPHSLFFKDALRDQGRIVCAERTVLLLQKPLLSVVSGASSCELPGPVMLDSLDSATPVNSICSVQGTVVGVDESTAFSWPVCDMCGNGRLEQRPEDRGAFSCGDCSRVVTSPVLKRHLQVFLDCRSRPQCRVKVKLLQRSISSLLRFAAGEDGSYEVKSVLGKEVGLLNCFVQSVTAHPTSCIGLEEIELLSAGGASAEH

SEQ ID NO: 27415 - protein, 262 aa, Artificial Sequence; identical to SEQ ID NO: 27414
  Synthetic polypeptide

SEQ ID NO: 27416 - protein, 262 aa, Artificial Sequence; identical to SEQ ID NO: 27414
  Synthetic polypeptide

SEQ ID NO: 27417 - protein, 5 aa, Artificial Sequence
  Synthetic polypeptide
LSLCS

SEQ ID NO: 27418 - protein, 5 aa, Artificial Sequence
  Synthetic polypeptide
LSLCS

SEQ ID NO: 27419 - protein, 5 aa, Artificial Sequence
  Synthetic polypeptide
LSLCS

SEQ ID NO: 27420 - protein, 5 aa, Artificial Sequence
  Synthetic polypeptide
LSLCS

SEQ ID NO: 27421 - protein, 5 aa, Artificial Sequence
  Synthetic polypeptide
LSLCS

SEQ ID NO: 27422 - protein, 283 aa, Artificial Sequence
  Synthetic polypeptide
MTELVQLKSLLLLEQREIWLLVTDVTLQTKEERDPRLPKTLLVYVAPLCVLGSEVLEALAGAAPHSLFFKDALRDQGRIVCAERTVLLLQKPLLSVVSGASSCELPGPVMLDSLDSATPVNSICSVQGTVVGVDESTAFSWPVCDMCGNGRLEQRPEDRGAFSCGDCSRVVTSPVLKRHLQVFLDCRSRPQCRVKVKVGARPEHARTPSSLQHSEELRSEECPRKGSGVVKLFCPVRNRPPDQLHWIGGNRASECRRGLCRTLAVAAGSVNFAMWLQGWWWWW

SEQ ID NO: 27423 - protein, 162 aa, Artificial Sequence
  Synthetic polypeptide
MTELVQLKSLLLLEQREIWLLVTDVTLQTKEERDPRLPKTLLVYVAPLCVLGSEVLEALAGAAPHSLFFKDALRDQGRIVCAERTVLLLQKPLLSVVSGASSCELPGPVMLDSLDSATPVNSICSVQGTVVGVDESTAFSWPVCDMCGNGRLEQRPEDRATK

SEQ ID NO: 27424 - protein, 236 aa, Artificial Sequence
  Synthetic polypeptide
LIIVYMGWCEAREQDPLQDRVYSPTFLALRGSCLYKFLAPPVTTWDWTRAEKTFSVYEIMCKILKDSDLLDRRKQCFTVQSESGEDLYFSVELESDLAQWERAFQTATFLEVERIQCKTYACVLESHLMGLTIDFSTGFICFDAATKAVLWRYKFSQLKGSSDDGKSKIKFLFQNPDTKQIEAKELEFSNLFAVLHCIHSFFAAKVACLDPLFLGNQATASTAASSATTSKAKYTT

SEQ ID NO: 27425 - protein, 236 aa, Artificial Sequence; identical to SEQ ID NO: 27424
  Synthetic polypeptide

SEQ ID NO: 27426 - protein, 69 aa, Artificial Sequence
  Synthetic polypeptide
TLEQHRFGHRGSTDNVDFLPPLPPLRQQDKYLLFLFLLLPSLLNMKTMKMKSFMMIHSDLINNCLHGLV

SEQ ID NO: 27427 - protein, 69 aa, Artificial Sequence; identical to SEQ ID NO: 27426
  Synthetic polypeptide

SEQ ID NO: 27428 - protein, 69 aa, Artificial Sequence; identical to SEQ ID NO: 27426
  Synthetic polypeptide

SEQ ID NO: 27429 - protein, 69 aa, Artificial Sequence; identical to SEQ ID NO: 27426
  Synthetic polypeptide

SEQ ID NO: 27430 - protein, 69 aa, Artificial Sequence; identical to SEQ ID NO: 27426
  Synthetic polypeptide

SEQ ID NO: 27431 - protein, 69 aa, Artificial Sequence; identical to SEQ ID NO: 27426
  Synthetic polypeptide

SEQ ID NO: 27432 - protein, 199 aa, Artificial Sequence
  Synthetic polypeptide
LIIVYMGWCEAREQDPLQDRVYSPTFLALRGSCLYKFLAPPVTTWDWTRAEKTFSVYEIMCKILKDSDLLDRRKQCFTVQSESGEDLYFSVELESDLAQWERAFQTATFLEVERIQCKTYACVLESHLMGLTIDFSTGFICFDAATKELEFSNLFAVLHCIHSFFAAKVACLDPLFLGNQATASTAASSATTSKAKYTT

SEQ ID NO: 27433 - protein, 199 aa, Artificial Sequence; identical to SEQ ID NO: 27432
  Synthetic polypeptide

SEQ ID NO: 27434 - protein, 67 aa, Artificial Sequence
  Synthetic polypeptide
LIIVYMGWCEAREQDPLQDRVYSPTFLALRGSCLYKFLAPPVTTWDWTRAEKTFSVYEIMCKILKPV

SEQ ID NO: 27435 - protein, 65 aa, Artificial Sequence
  Synthetic polypeptide
LIIVYMGWCEAREQDPLQDRVYSPTFLALRGSCLYKFLAPPVTTWDWTRAEKTFSVYEIMCKILK

SEQ ID NO: 27436 - protein, 225 aa, Artificial Sequence
  Synthetic polypeptide
TWEAEVAQMGSERMEMRKRQMPAAQDTPGAAPGQPGAGSRGSNACCFCWCCCCSCSCLTVRNQEDQRPTIASHELRADLPTWEESPAPTLEEVNAWAQSFDKLMVTPAGRNAFREFLRTEFSEENMLFWMACEELKKEANKNIIEEKARIIYEDYISILSPKEVSLDSRVREVINRNMVEPSQHIFDDAQLQIYTLMHRDSYPRFMNSAVYKDLLQSLSEKSIEA

SEQ ID NO: 27437 - protein, 225 aa, Artificial Sequence; identical to SEQ ID NO: 27436
  Synthetic polypeptide

SEQ ID NO: 27438 - protein, 225 aa, Artificial Sequence; identical to SEQ ID NO: 27436
  Synthetic polypeptide

SEQ ID NO: 27439 - protein, 96 aa, Artificial Sequence
  Synthetic polypeptide
KYKISRAWWCMPVILATREAEAGELLEPGRQRLRRWDQSGWRCGSGRCPPPRTHQAPPQASPERGVAGPTHAASAGAAVVAARVSLLETRKIRGPQ

SEQ ID NO: 27440 - protein, 96 aa, Artificial Sequence; identical to SEQ ID NO: 27439
  Synthetic polypeptide

SEQ ID NO: 27441 - protein, 96 aa, Artificial Sequence; identical to SEQ ID NO: 27439
  Synthetic polypeptide

SEQ ID NO: 27442 - protein, 64 aa, Artificial Sequence
  Synthetic polypeptide
LLGRLRQENCLNLGGRGCADGIRADGDAEAADARRPGHTRRRPRPARSGESRVQRMLLLLVLLL

SEQ ID NO: 27443 - protein, 64 aa, Artificial Sequence; identical to SEQ ID NO: 27442
  Synthetic polypeptide

SEQ ID NO: 27444 - protein, 64 aa, Artificial Sequence; identical to SEQ ID NO: 27442
  Synthetic polypeptide

SEQ ID NO: 27445 - protein, 94 aa, Artificial Sequence
  Synthetic polypeptide
NKGKKEKLEHFARDAASAALADAAEELLDRLASHSMLPSDVSILYHMKTLLLLQDTERLKHALEMFPEHCTMPPGVLSRLKAKKIRRGKREGLP

SEQ ID NO: 27446 - protein, 136 aa, Artificial Sequence
  Synthetic polypeptide
HCPKCVATLESAQSLHGPGDPPLLGLPGGAKGEPSRGKCRHPRPLQSFLCVQQQFTGHATRQDHSTENHEKKRAVEPQWERPMLSDKEPKIRGKRKNWSISPEMQLQLPSQMPLRSCWTALRHTACCPQTCPSCTT

SEQ ID NO: 27447 - protein, 136 aa, Artificial Sequence; identical to SEQ ID NO: 27446
  Synthetic polypeptide

SEQ ID NO: 27448 - protein, 136 aa, Artificial Sequence; identical to SEQ ID NO: 27446
  Synthetic polypeptide

SEQ ID NO: 27449 - protein, 136 aa, Artificial Sequence; identical to SEQ ID NO: 27446
  Synthetic polypeptide

SEQ ID NO: 27450 - protein, 22 aa, Artificial Sequence
  Synthetic polypeptide
GEKGKIGAFRQRCSFSCPRRCR

SEQ ID NO: 27451 - protein, 22 aa, Artificial Sequence
  Synthetic polypeptide
GEKGKIGAFRQRCSFSCPRRCR

SEQ ID NO: 27452 - protein, 22 aa, Artificial Sequence
  Synthetic polypeptide
GEKGKIGAFRQRCSFSCPRRCR

SEQ ID NO: 27453 - protein, 22 aa, Artificial Sequence
  Synthetic polypeptide
GEKGKIGAFRQRCSFSCPRRCR

SEQ ID NO: 27454 - protein, 120 aa, Artificial Sequence
  Synthetic polypeptide
NKGKKEKLEHFARDAASAALADAAEELLDRLASHSMLPSDVSILYHMKTLLLLQDTERLKHALEMFPEHCTMPPGGKSEAQRAWANGTGHTAHQWLHVSSDLGLLLSVFPISMTLTDAGV

SEQ ID NO: 27455 - protein, 98 aa, Artificial Sequence
  Synthetic polypeptide
NKGKKEKLEHFARDAASAALADAAEELLDRLASHSMLPSDVSILYHMKTLLLLQDTERLKHALEMFPEHCTMPPDHARVISAFFSYWITHILPEKSSD

SEQ ID NO: 27456 - protein, 109 aa, Artificial Sequence
  Synthetic polypeptide
NKGKKEKLEHFARDAASAALADAAEELLDRLASHSMLPSDVSILYHMKTLLLLQDTERLKHALEMFPEHCTMPPGKYRTIYSRSCLRYSHRGLPLKDLHATKTAMSWKI

SEQ ID NO: 27457 - protein, 45 aa, Artificial Sequence
  Synthetic polypeptide
TWISFFSVLPPCEEGFVCFPFCHGYKFPEASSALQNCLSIREADL

SEQ ID NO: 27458 - protein, 45 aa, Artificial Sequence; identical to SEQ ID NO: 27457
  Synthetic polypeptide

SEQ ID NO: 27459 - protein, 45 aa, Artificial Sequence; identical to SEQ ID NO: 27457
  Synthetic polypeptide

SEQ ID NO: 27460 - protein, 221 aa, Artificial Sequence
  Synthetic polypeptide
EAFPFELGSHSSPSCRPVKKDLFASPSAMVISFLRLPQPCRTVSALERQIFDFLGFQWAPILGNFLHIIVVILGLFGTIQYRPRYIMVYTVWTALWVTWNVFIICFYLEVGGLSKDTDLMTFNISVHRSWWREHGPGCVRRVLPPSAHGMMDDYTYVSVTGCIVDFQYLEVIHSAVQILLSLVGFVYACYVISISMEEEDTYSCDLQVCKHLFIQMLQIIE

SEQ ID NO: 27461 - protein, 221 aa, Artificial Sequence; identical to SEQ ID NO: 27460
  Synthetic polypeptide

SEQ ID NO: 27462 - protein, 11 aa, Artificial Sequence
  Synthetic polypeptide
GFLSPAELSQH

SEQ ID NO: 27463 - protein, 11 aa, Artificial Sequence
  Synthetic polypeptide
GFLSPAELSQH

SEQ ID NO: 27464 - protein, 11 aa, Artificial Sequence
  Synthetic polypeptide
GFLSPAELSQH

SEQ ID NO: 27465 - protein, 125 aa, Artificial Sequence
  Synthetic polypeptide
EAFPFELGSHSSPSCRPVKKDLFASPSAMVISFLRLPQPCRTVSALERQIFDFLGFQWAPILGNFLHIIVVILGLFGTIQYRPRYIMVDTDLMTFNISVHRSWWREHGPGCVRRVLPPSAHGMMD

SEQ ID NO: 27466 - protein, 64 aa, Artificial Sequence
  Synthetic polypeptide
CLRPAITLYIMPFCLVYCLSSFPSLLHPRINAHRAGAFVWFTHSHVSPAASLLPGMRNINAKMP

SEQ ID NO: 27467 - protein, 8 aa, Artificial Sequence
  Synthetic polypeptide
FVAWHEEY

SEQ ID NO: 27468 - protein, 51 aa, Artificial Sequence
  Synthetic polypeptide
SRLRYSLKCTIPQKLNNLLLNGFWVNNDIKAEIKKMRTKIQHTGISGAQEY

SEQ ID NO: 27469 - protein, 20 aa, Artificial Sequence
  Synthetic polypeptide
EQRYNILESLGHRNINAKMP

SEQ ID NO: 27470 - protein, 301 aa, Artificial Sequence
  Synthetic polypeptide
GRNKENENKDTTYWNLWGTGILMQKCRNKVMKNYGRYYIAASYVKYLESAGARVVPVRLDLTEKDYEILFKSINGILFPGGSVDLRRSDYAKVAKIFYNLSIQSFDDGDYFPVWGTCLGFEELSLLISGECLLTATDTVDVAMPLNFTGGQLHSRMFQNFPTELLLSLAVEPLTANFHKWSLSVKNFTMNEKLKKFFNVLTTNTDGKIEFISTMEGYKYPVYGVQWHPEKAPYEWKNLDGISHAPNAVKTAFYLAEFFVNEARKNNHHFKSESEEEKALIYQFSPIYTGNISSFQQCYIFD

SEQ ID NO: 27471 - protein, 5 aa, Artificial Sequence
  Synthetic polypeptide
EQHAC

SEQ ID NO: 27472 - protein, 5 aa, Artificial Sequence
  Synthetic polypeptide
EQHAC

SEQ ID NO: 27473 - protein, 272 aa, Artificial Sequence
  Synthetic polypeptide
NSMRVDWIVADILAIRQNALGHVRYVLKEGLKWLPLYGCYFAQHGGIYVKRSAKFNEKEMRNKLQSYVDAGTPMYLVIFPEGTRYNPEQTKVLSASQAFAAQRGLAVLKHVLTPRIKATHVAFDCMKNYLDAIYDVTVVYEGKDDGGQRRESPTMTEFLCKECPKIHIHIDRIDKKDVPEEQEHMRRWLHERFEIKDKMLIEFYESPDPERRKRFPGKSVNSKLSIKKTLPSMLILSGLTAGMLMTDAGRKLYVNTWIYGTLLGCLWVTIKA

SEQ ID NO: 27474 - protein, 19 aa, Artificial Sequence
  Synthetic polypeptide
TACVLTGLLLTSWPSGRMR

SEQ ID NO: 27475 - protein, 19 aa, Artificial Sequence
  Synthetic polypeptide
TACVLTGLLLTSWPSGRMR

SEQ ID NO: 27476 - protein, 20 aa, Artificial Sequence
  Synthetic polypeptide
NSMRVDWIVADILAIRQNAL

SEQ ID NO: 27477 - protein, 48 aa, Artificial Sequence
  Synthetic polypeptide
GNRMIFSVSNYKRNNGSEQKQSCIQAEWSPVPSSWLYSAPRVQALSGI

SEQ ID NO: 27478 - protein, 43 aa, Artificial Sequence
  Synthetic polypeptide
SFQFQTIRETMDQSRSNHVYRQNGAQSLPAGFIQPHVSKHCLG

SEQ ID NO: 27479 - protein, 36 aa, Artificial Sequence
  Synthetic polypeptide
EKQWIRAEAIMYTGRMEPSPFQLALFSPTCPSIVWD

SEQ ID NO: 27480 - protein, 179 aa, Artificial Sequence
  Synthetic polypeptide
RKDLRRSGRRKEQGRKQKYGKLALKHHPDKNPDDPAATEKFKEINNAHAILTDISKRSIYDKYGSLGLYVAEQFGDENVNTYFMLSSWWAKALFVIVGLLTGCYFCCCLCCCCNCCCGHCRPESSVPEEDFYVSPEDLEEQIKSDMEKDVDFPVFLQPTNANEKTQLIKEGSRSYCTDS

SEQ ID NO: 27481 - protein, 51 aa, Artificial Sequence
  Synthetic polypeptide
RESKRIVTSRSLLKEWLKEVLRKKGNDKERILDDQEEGKNKGESRNMENWP

SEQ ID NO: 27482 - protein, 51 aa, Artificial Sequence; identical to SEQ ID NO: 27481
  Synthetic polypeptide

SEQ ID NO: 27483 - protein, 28 aa, Artificial Sequence
  Synthetic polypeptide
TIRKKERTREKAEIWKIGPETPSRQESR

SEQ ID NO: 27484 - protein, 28 aa, Artificial Sequence
  Synthetic polypeptide
TIRKKERTREKAEIWKIGPETPSRQESR

SEQ ID NO: 27485 - protein, 76 aa, Artificial Sequence
  Synthetic polypeptide
RKDLRRSGRRKEQGRKQKYGKLALKHHPDKNPDDPAATEKFKEINNAHAILTDISKRSIYDKYGSLGLYVAEQFGD

SEQ ID NO: 27486 - protein, 46 aa, Artificial Sequence
  Synthetic polypeptide
PGGTRLWSQLLRRLKHENRLNPGGRGCSEPRSHHCTPAWATEDMLS

SEQ ID NO: 27487 - protein, 46 aa, Artificial Sequence; identical to SEQ ID NO: 27486
  Synthetic polypeptide

SEQ ID NO: 27488 - protein, 46 aa, Artificial Sequence; identical to SEQ ID NO: 27486
  Synthetic polypeptide

SEQ ID NO: 27489 - protein, 46 aa, Artificial Sequence; identical to SEQ ID NO: 27486
  Synthetic polypeptide

SEQ ID NO: 27490 - protein, 46 aa, Artificial Sequence; identical to SEQ ID NO: 27486
  Synthetic polypeptide

SEQ ID NO: 27491 - protein, 46 aa, Artificial Sequence; identical to SEQ ID NO: 27486
  Synthetic polypeptide

SEQ ID NO: 27492 - protein, 32 aa, Artificial Sequence
  Synthetic polypeptide
TQEAEVAVSRDHTTALQPGQQRTCCLNRFWAL

SEQ ID NO: 27493 - protein, 32 aa, Artificial Sequence; identical to SEQ ID NO: 27492
  Synthetic polypeptide

SEQ ID NO: 27494 - protein, 32 aa, Artificial Sequence; identical to SEQ ID NO: 27492
  Synthetic polypeptide

SEQ ID NO: 27495 - protein, 32 aa, Artificial Sequence; identical to SEQ ID NO: 27492
  Synthetic polypeptide

SEQ ID NO: 27496 - protein, 32 aa, Artificial Sequence; identical to SEQ ID NO: 27492
  Synthetic polypeptide

SEQ ID NO: 27497 - protein, 32 aa, Artificial Sequence; identical to SEQ ID NO: 27492
  Synthetic polypeptide

SEQ ID NO: 27498 - protein, 212 aa, Artificial Sequence
  Synthetic polypeptide
AEITPLHSSLGNRGHVVLTDFGLCKEGIAISDTTTTFCGTPEYLAPEVIRKQPYDNTVDWWCLGAVLYEMLYGLPPFYCRDVAEMYDNILHKPLSLRPGVSLTAWSILEELLEKDRQNRLGAKEDFLEIQNHPFFESLSWADLVQKKIPPPFNPNVAGPDDIRNFDTAFTEETVPYSVCVSSDYSIVNASVLEADDAFVGFSYAPPSEDLFL

SEQ ID NO: 27499 - protein, 212 aa, Artificial Sequence; identical to SEQ ID NO: 27498
  Synthetic polypeptide

SEQ ID NO: 27500 - protein, 212 aa, Artificial Sequence; identical to SEQ ID NO: 27498
  Synthetic polypeptide

SEQ ID NO: 27501 - protein, 212 aa, Artificial Sequence; identical to SEQ ID NO: 27498
  Synthetic polypeptide

SEQ ID NO: 27502 - protein, 212 aa, Artificial Sequence; identical to SEQ ID NO: 27498
  Synthetic polypeptide

SEQ ID NO: 27503 - protein, 180 aa, Artificial Sequence
  Synthetic polypeptide
AEITPLHSSLGNRGHVVLTDFGLCKEGIAISDTTTTFCGTPEPPFYCRDVAEMYDNILHKPLSLRPGVSLTAWSILEELLEKDRQNRLGAKEDFLEIQNHPFFESLSWADLVQKKIPPPFNPNVAGPDDIRNFDTAFTEETVPYSVCVSSDYSIVNASVLEADDAFVGFSYAPPSEDLFL

SEQ ID NO: 27504 - protein, 36 aa, Artificial Sequence
  Synthetic polypeptide
ISENVWRCLNVQAEICCRSEPSRRTSATAVQRILMI

SEQ ID NO: 27505 - protein, 36 aa, Artificial Sequence; identical to SEQ ID NO: 27504
  Synthetic polypeptide

SEQ ID NO: 27506 - protein, 36 aa, Artificial Sequence; identical to SEQ ID NO: 27504
  Synthetic polypeptide

SEQ ID NO: 27507 - protein, 36 aa, Artificial Sequence; identical to SEQ ID NO: 27504
  Synthetic polypeptide

SEQ ID NO: 27508 - protein, 24 aa, Artificial Sequence
  Synthetic polypeptide
MSKQKSAAGQSPQGEPLLQQCRGS

SEQ ID NO: 27509 - protein, 24 aa, Artificial Sequence
  Synthetic polypeptide
MSKQKSAAGQSPQGEPLLQQCRGS

SEQ ID NO: 27510 - protein, 24 aa, Artificial Sequence
  Synthetic polypeptide
MSKQKSAAGQSPQGEPLLQQCRGS

SEQ ID NO: 27511 - protein, 24 aa, Artificial Sequence
  Synthetic polypeptide
MSKQKSAAGQSPQGEPLLQQCRGS

SEQ ID NO: 27512 - protein, 232 aa, Artificial Sequence
  Synthetic polypeptide
EDAIPKSYSFHVVLGLLLCKRREFSFGSLHLDFRECMEMSECPSRNLLQVRALKENLCYSSAEDLNDLRMEGVTTLVPSGSKFNQGRPTYPAEPQAKVTLNICSRCARLQGDNLEERTEESLPILHSPDEKIPDSFDSLPGTEEALMEEGDEFEKASKLTGPGEASSGVGHSLKNYMEEDESLKQLQVVHQPWILPSDTESEGVEAEQEKRSADLLLCVPCSSCPTLVYSGL

SEQ ID NO: 27513 - protein, 232 aa, Artificial Sequence; identical to SEQ ID NO: 27512
  Synthetic polypeptide

SEQ ID NO: 27514 - protein, 232 aa, Artificial Sequence; identical to SEQ ID NO: 27512
  Synthetic polypeptide

SEQ ID NO: 27515 - protein, 237 aa, Artificial Sequence
  Synthetic polypeptide
EDAIPKSYSFHVVLGLLLCKRREFSFGSLHLDFRECMEMSECPSRNLLQVRALKENLCYSSAEDLNDLRMEGVTTLVPSGSKFNQGRPTYPAEPQAKVTLNICSRCARLQGDNLEERTEESLPILHSPDEKIPDSFDSLPGTEEALMEEGDEFEKASKLTGPGEASSGVGHSLKNYMEEDESLKQLQVVHQPWILPSDTESEGVEAEQEKHLLNQNLCGWDSEFCIFHTLASFLIYK

SEQ ID NO: 27516 - protein, 52 aa, Artificial Sequence
  Synthetic polypeptide
ISENVWRCLNVQAEICCRSEPSRRTSATAVQASRRQPGRKDRRVTTNTPFSR

SEQ ID NO: 27517 - protein, 52 aa, Artificial Sequence; identical to SEQ ID NO: 27516
  Synthetic polypeptide

SEQ ID NO: 27518 - protein, 52 aa, Artificial Sequence; identical to SEQ ID NO: 27516
  Synthetic polypeptide

SEQ ID NO: 27519 - protein, 52 aa, Artificial Sequence; identical to SEQ ID NO: 27516
  Synthetic polypeptide

SEQ ID NO: 27520 - protein, 146 aa, Artificial Sequence
  Synthetic polypeptide
MSKQKSAAGQSPQGEPLLQQCRLQGDNLEERTEESLPILHSPDEKIPDSFDSLPGTEEALMEEGDEFEKASKLTGPGEASSGVGHSLKNYMEEDESLKQLQVVHQPWILPSDTESEGVEAEQEKRSADLLLCVPCSSCPTLVYSGL

SEQ ID NO: 27521 - protein, 146 aa, Artificial Sequence; identical to SEQ ID NO: 27520
  Synthetic polypeptide

SEQ ID NO: 27522 - protein, 146 aa, Artificial Sequence; identical to SEQ ID NO: 27520
  Synthetic polypeptide

SEQ ID NO: 27523 - protein, 100 aa, Artificial Sequence
  Synthetic polypeptide
EDAIPKSYSFHVVLGLLLCKRREFSFGSLHLDFRECMEMSECPSRNLLQVRALKENLCYSSAGFKETTWKKGQKSHYQYSILQMKKSQIHSIPCLGLKKH

SEQ ID NO: 27524 - protein, 100 aa, Artificial Sequence; identical to SEQ ID NO: 27523
  Synthetic polypeptide

SEQ ID NO: 27525 - protein, 100 aa, Artificial Sequence; identical to SEQ ID NO: 27523
  Synthetic polypeptide

SEQ ID NO: 27526 - protein, 100 aa, Artificial Sequence; identical to SEQ ID NO: 27523
  Synthetic polypeptide

SEQ ID NO: 27527 - protein, 151 aa, Artificial Sequence
  Synthetic polypeptide
MSKQKSAAGQSPQGEPLLQQCRLQGDNLEERTEESLPILHSPDEKIPDSFDSLPGTEEALMEEGDEFEKASKLTGPGEASSGVGHSLKNYMEEDESLKQLQVVHQPWILPSDTESEGVEAEQEKHLLNQNLCGWDSEFCIFHTLASFLIYK

SEQ ID NO: 27528 - protein, 239 aa, Artificial Sequence
  Synthetic polypeptide
IPTRGNSKESVLQTKQKCSEAQEEVKSKGSNAAIMVSCCAISWSTVDYQVALRKSLPDKKLLNGLCPKITYLFYKLFTLLSWMLSVVLLLFLNVKIALFLLLFLWLLGIIWAFKNNTQFCTCISMEFLYRIVVGFILIFTFFNIKGQNTKCPMSCYYIVRVLGTLGILTVFWVCPLTIFNPDYFIPISITIVLTLLLGILFLIVYYGSFHPNRSAETKCDEIDGKPVLRECRMRYFLME

SEQ ID NO: 27529 - protein, 239 aa, Artificial Sequence; identical to SEQ ID NO: 27528
  Synthetic polypeptide

SEQ ID NO: 27530 - protein, 24 aa, Artificial Sequence
  Synthetic polypeptide
RAKEVMRPSWSLAVLFLGQLLIIK

SEQ ID NO: 27531 - protein, 24 aa, Artificial Sequence
  Synthetic polypeptide
RAKEVMRPSWSLAVLFLGQLLIIK

SEQ ID NO: 27532 - protein, 18 aa, Artificial Sequence
  Synthetic polypeptide
GLLSHAELLQIIPTPENT

SEQ ID NO: 27533 - protein, 18 aa, Artificial Sequence
  Synthetic polypeptide
GLLSHAELLQIIPTPENT

SEQ ID NO: 27534 - protein, 61 aa, Artificial Sequence
  Synthetic polypeptide
VLMRSGGFIIVWLFLMRSFSFLLPVKKVPCFPFTFHHDCKFPEASSAMQNYFKSSQHQRTL

SEQ ID NO: 27535 - protein, 61 aa, Artificial Sequence; identical to SEQ ID NO: 27534
  Synthetic polypeptide

SEQ ID NO: 27536 - protein, 35 aa, Artificial Sequence
  Synthetic polypeptide
RRCLASPSPSTMIASFLRPPQPCRTTSNHPNTREH

SEQ ID NO: 27537 - protein, 35 aa, Artificial Sequence; identical to SEQ ID NO: 27536
  Synthetic polypeptide

SEQ ID NO: 27538 - protein, 150 aa, Artificial Sequence
  Synthetic polypeptide
SPSLHLSPMLDAACPQTSDCKFFSFWTLGLTPVICQELSGLQQQTEGCAVGFPTFEVLGLRLASWLFSLQMAYCGTSPCDHLARASWGNGAPGVVVQTSASLQPVCGGARCSRSLRTAGRPAHPWKRELAAWSTPPRRARTAGTPMFLPL

SEQ ID NO: 27539 - protein, 148 aa, Artificial Sequence
  Synthetic polypeptide
FARSSQAFSNRLKAVLSASLLLRFWDSDWLPGSSACRWPIVGLHLVIISPVLRGGMEPLEWLCRPVQAYNPCAEALGAAGASERRGALPTPGRESWLPGVLHPAGPGLRAHLCSCLYNYLCIQQGENTTSYVSTLVYTHRGCWILYGV

SEQ ID NO: 27540 - protein, 194 aa, Artificial Sequence
  Synthetic polypeptide
SSRPCFVGEWSPWSGCADQCKPTTRVRRRSVQQEPQNGGAPCPPLEERAGCLEYSTPQGQDCGHTYVPAFITTSAFNKERTRQATSPHWSTHTEDAGYCMEFKTESLTPHCALENWPLTRWMQYLREGYTVCVDCQPPAMNSVSLRCSGDGLDSDGNQTLHWQAIGNPRCQGTWKKVRRVDQCSCPAVHSFIFI

SEQ ID NO: 27541 - protein, 71 aa, Artificial Sequence
  Synthetic polypeptide
GRARWLMPVIPALWEAEVSLLRTKPMRSILERYLHMCYRKYACILRTRFATLTAPPRFLNSQLHLKLHWNC

SEQ ID NO: 27542 - protein, 71 aa, Artificial Sequence; identical to SEQ ID NO: 27541
  Synthetic polypeptide

SEQ ID NO: 27543 - protein, 71 aa, Artificial Sequence; identical to SEQ ID NO: 27541
  Synthetic polypeptide

SEQ ID NO: 27544 - protein, 71 aa, Artificial Sequence; identical to SEQ ID NO: 27541
  Synthetic polypeptide

SEQ ID NO: 27545 - protein, 71 aa, Artificial Sequence; identical to SEQ ID NO: 27541
  Synthetic polypeptide

SEQ ID NO: 27546 - protein, 71 aa, Artificial Sequence; identical to SEQ ID NO: 27541
  Synthetic polypeptide

SEQ ID NO: 27547 - protein, 71 aa, Artificial Sequence; identical to SEQ ID NO: 27541
  Synthetic polypeptide

SEQ ID NO: 27548 - protein, 11 aa, Artificial Sequence
  Synthetic polypeptide
SQHFGRLRSVC

SEQ ID NO: 27549 - protein, 11 aa, Artificial Sequence
  Synthetic polypeptide
SQHFGRLRSVC

SEQ ID NO: 27550 - protein, 11 aa, Artificial Sequence
  Synthetic polypeptide
SQHFGRLRSVC

SEQ ID NO: 27551 - protein, 11 aa, Artificial Sequence
  Synthetic polypeptide
SQHFGRLRSVC

SEQ ID NO: 27552 - protein, 11 aa, Artificial Sequence
  Synthetic polypeptide
SQHFGRLRSVC

SEQ ID NO: 27553 - protein, 11 aa, Artificial Sequence
  Synthetic polypeptide
SQHFGRLRSVC

SEQ ID NO: 27554 - protein, 11 aa, Artificial Sequence
  Synthetic polypeptide
SQHFGRLRSVC

SEQ ID NO: 27555 - protein, 11 aa, Artificial Sequence
  Synthetic polypeptide
SQHFGRLRSVC

SEQ ID NO: 27556 - protein, 57 aa, Artificial Sequence
  Synthetic polypeptide
GRARWLMPVIPALWEAEVSLLRTKPMRSILERYLHMCYRKYACILRTRFATLTAPPR

SEQ ID NO: 27557 - protein, 68 aa, Artificial Sequence
  Synthetic polypeptide
VPYTDGEEKTYGGCEGPDAMYVKLISSDGHEFIVKREHALTSGTIKAMLSGPDMVSTMLPRLKCSGCS

SEQ ID NO: 27558 - protein, 49 aa, Artificial Sequence
  Synthetic polypeptide
AFTFTHHSLTNSHRAISSPADSIHRECPIQMERRKPMVAVKDLMPCMSN

SEQ ID NO: 27559 - protein, 49 aa, Artificial Sequence; identical to SEQ ID NO: 27558
  Synthetic polypeptide

SEQ ID NO: 27560 - protein, 49 aa, Artificial Sequence; identical to SEQ ID NO: 27558
  Synthetic polypeptide

SEQ ID NO: 27561 - protein, 49 aa, Artificial Sequence; identical to SEQ ID NO: 27558
  Synthetic polypeptide

SEQ ID NO: 27562 - protein, 49 aa, Artificial Sequence; identical to SEQ ID NO: 27558
  Synthetic polypeptide

SEQ ID NO: 27563 - protein, 49 aa, Artificial Sequence; identical to SEQ ID NO: 27558
  Synthetic polypeptide

SEQ ID NO: 27564 - protein, 49 aa, Artificial Sequence; identical to SEQ ID NO: 27558
  Synthetic polypeptide

SEQ ID NO: 27565 - protein, 49 aa, Artificial Sequence; identical to SEQ ID NO: 27558
  Synthetic polypeptide

SEQ ID NO: 27566 - protein, 42 aa, Artificial Sequence
  Synthetic polypeptide
CIRPSHSLTTHLPTHTEQFPVLQTPFIVSALYRWRGENLWWL

SEQ ID NO: 27567 - protein, 42 aa, Artificial Sequence; identical to SEQ ID NO: 27566
  Synthetic polypeptide

SEQ ID NO: 27568 - protein, 42 aa, Artificial Sequence; identical to SEQ ID NO: 27566
  Synthetic polypeptide

SEQ ID NO: 27569 - protein, 42 aa, Artificial Sequence; identical to SEQ ID NO: 27566
  Synthetic polypeptide

SEQ ID NO: 27570 - protein, 42 aa, Artificial Sequence; identical to SEQ ID NO: 27566
  Synthetic polypeptide

SEQ ID NO: 27571 - protein, 42 aa, Artificial Sequence; identical to SEQ ID NO: 27566
  Synthetic polypeptide

SEQ ID NO: 27572 - protein, 42 aa, Artificial Sequence; identical to SEQ ID NO: 27566
  Synthetic polypeptide

SEQ ID NO: 27573 - protein, 42 aa, Artificial Sequence; identical to SEQ ID NO: 27566
  Synthetic polypeptide

SEQ ID NO: 27574 - protein, 115 aa, Artificial Sequence
  Synthetic polypeptide
VPYTDGEEKTYGGCEGPDAMYVKLISSDGHEFIVKREHALTSGTIKAMLSGPGQFAENETNEVNFREIPSHVLSKVCMYFTYKVRYTNSSTEIPEFPIAPEIALELLMAANFLDC

SEQ ID NO: 27575 - protein, 115 aa, Artificial Sequence; identical to SEQ ID NO: 27574
  Synthetic polypeptide

SEQ ID NO: 27576 - protein, 115 aa, Artificial Sequence; identical to SEQ ID NO: 27574
  Synthetic polypeptide

SEQ ID NO: 27577 - protein, 115 aa, Artificial Sequence; identical to SEQ ID NO: 27574
  Synthetic polypeptide

SEQ ID NO: 27578 - protein, 115 aa, Artificial Sequence; identical to SEQ ID NO: 27574
  Synthetic polypeptide

SEQ ID NO: 27579 - protein, 115 aa, Artificial Sequence; identical to SEQ ID NO: 27574
  Synthetic polypeptide

SEQ ID NO: 27580 - protein, 92 aa, Artificial Sequence
  Synthetic polypeptide
VPYTDGEEKTYGGCEGPDAMYVKLISSDGHEFIVKREHALTSGTIKAMLSGPGQFAENETNEVNFREIPSHVLSKVCMYFTYKVRYTNSSTE

SEQ ID NO: 27581 - protein, 66 aa, Artificial Sequence
  Synthetic polypeptide
VVECCDVPLRSFFRNKGIIMSMAGRAVPKIAMSYQPPLGTAPPEERHLAKLKLCHLLCLMRQFHLI

SEQ ID NO: 27582 - protein, 66 aa, Artificial Sequence; identical to SEQ ID NO: 27581
  Synthetic polypeptide

SEQ ID NO: 27583 - protein, 18 aa, Artificial Sequence
  Synthetic polypeptide
VISHLLELPHQKRGTSPS

SEQ ID NO: 27584 - protein, 18 aa, Artificial Sequence
  Synthetic polypeptide
VISHLLELPHQKRGTSPS

SEQ ID NO: 27585 - protein, 121 aa, Artificial Sequence
  Synthetic polypeptide
CATQILLQEQRNYHVHGWQSCPQNSHELSATSWNCPTRREAPRQAEAMPSFMSDEAVSSDLKMMKKSSLQGCLLNITGKTGKLGGMFWSDLSFSSGARVQSSHQINTFSKLINFGEATQSS

SEQ ID NO: 27586 - protein, 121 aa, Artificial Sequence; identical to SEQ ID NO: 27585
  Synthetic polypeptide

SEQ ID NO: 27587 - protein, 43 aa, Artificial Sequence
  Synthetic polypeptide
TNVNKASLLRMSLSFSCCNVPRDLTDDRGSPENAAYGRRERLL

SEQ ID NO: 27588 - protein, 43 aa, Artificial Sequence; identical to SEQ ID NO: 27587
  Synthetic polypeptide

SEQ ID NO: 27589 - protein, 43 aa, Artificial Sequence; identical to SEQ ID NO: 27587
  Synthetic polypeptide

SEQ ID NO: 27590 - protein, 221 aa, Artificial Sequence
  Synthetic polypeptide
AFHAVMCPEILQMTVDHLKMLHTAGGKGYFDAHALAMDYRSLGFRECLAEVARYLSIIEGLDASDPLRVRLVSHLNNYASQREAASGAHAGLGHIPWGTVFGHHPHIAHPLLLPQNGHGNAGTTASPTEPHHQGRLGSAHPEAPALRAPPSGSLGPVLPVVTSASKLSPPLLSSVASLSAFPFSFGSFHLLSPNALSPSAPTQAANLGKPYRPWGTEIGAF

SEQ ID NO: 27591 - protein, 221 aa, Artificial Sequence; identical to SEQ ID NO: 27590
  Synthetic polypeptide

SEQ ID NO: 27592 - protein, 7 aa, Artificial Sequence
  Synthetic polypeptide
CAPRSYR

SEQ ID NO: 27593 - protein, 7 aa, Artificial Sequence
  Synthetic polypeptide
CAPRSYR

SEQ ID NO: 27594 - protein, 7 aa, Artificial Sequence
  Synthetic polypeptide
CAPRSYR

SEQ ID NO: 27595 - protein, 141 aa, Artificial Sequence
  Synthetic polypeptide
AFHAVMCPEILQMTVDHLKMLHTAGGKGYFDAHALAMDYRSLGFRECLAEVARYLSIIEGLDASDPLRVRLVSHLNNYASQREAASGAHAGLGHIPWGTVFGHHPHIAHPLLLPQNGHGNAGTTASPTEPHHQGRLGSAHP

SEQ ID NO: 27596 - protein, 15 aa, Artificial Sequence
  Synthetic polypeptide
MAGCSSSRQSCCEWE

SEQ ID NO: 27597 - protein, 32 aa, Artificial Sequence
  Synthetic polypeptide
WLGVLHQDNHAASGNSFAKNGRNGQARLYHHL

SEQ ID NO: 27598 - protein, 120 aa, Artificial Sequence
  Synthetic polypeptide
GWVFFIKTIMLRVGIALRKMGAMAKPDCIITCDGKNLTIKTESTLKTTQFSCTLGEKFEETTADGRKTQTVCNFTDGALVQHQEWDGKESTITRKLKDGKLVVECVMNNVTCTRIYEKVE

SEQ ID NO: 27599 - protein, 122 aa, Artificial Sequence
  Synthetic polypeptide
MAGCSSSRQSCCVGVGIALRKMGAMAKPDCIITCDGKNLTIKTESTLKTTQFSCTLGEKFEETTADGRKTQTVCNFTDGALVQHQEWDGKESTITRKLKDGKLVVECVMNNVTCTRIYEKVE

SEQ ID NO: 27600 - protein, 33 aa, Artificial Sequence
  Synthetic polypeptide
GWVFFIKTIMLRRSGNSFAKNGRNGQARLYHHL

SEQ ID NO: 27601 - protein, 7 aa, Artificial Sequence
  Synthetic polypeptide
IFPRNVK

SEQ ID NO: 27602 - protein, 42 aa, Artificial Sequence
  Synthetic polypeptide
PLLHNRFTWGVNTNMEASKQIIQCKSLGGGGTITIFKYSPGM

SEQ ID NO: 27603 - protein, 42 aa, Artificial Sequence; identical to SEQ ID NO: 27602
  Synthetic polypeptide

SEQ ID NO: 27604 - protein, 35 aa, Artificial Sequence
  Synthetic polypeptide
FNVNLLGEEEPSLYLNIPQECKMKGVVCTRIYEKV

SEQ ID NO: 27605 - protein, 6 aa, Artificial Sequence
  Synthetic polypeptide
IFPRNV

SEQ ID NO: 27606 - protein, 21 aa, Artificial Sequence
  Synthetic polypeptide
FNVNLLGEEEPSLYLNIPQEC

SEQ ID NO: 27607 - protein, 130 aa, Artificial Sequence
  Synthetic polypeptide
GRARWLTPVIPALWKAEEGRSRGVGLATRKLGNLAKPTVIISKKGDIITIRTESTFKNTEISFKLGQEFEETTADNRKTKSIVTLQRGSLNQVQRWDGKETTIKRKLVNGKMVAECKMKGVVCTRIYEKV

SEQ ID NO: 27608 - protein, 16 aa, Artificial Sequence
  Synthetic polypeptide
SQHFGRPRRADHEVWG

SEQ ID NO: 27609 - protein, 51 aa, Artificial Sequence
  Synthetic polypeptide
PGAVAHACNPSTLEGRGGQITRCGVSHQKTGKFGQTHCDHQQERRYYNYTN

SEQ ID NO: 27610 - protein, 7 aa, Artificial Sequence
  Synthetic polypeptide
VPICAVI

SEQ ID NO: 27611 - protein, 61 aa, Artificial Sequence
  Synthetic polypeptide
DDHFPDPECLYVQLYDRQCDSADEWCIAEKICERNSGEVPPLGPFHRNGSCQHCRDTFRSL

SEQ ID NO: 27612 - protein, 276 aa, Artificial Sequence
  Synthetic polypeptide
VYRMLSKGYGDRSDYKMTTFQILSAYMCSYMIDNVILLMNGALQKKSVKEILGKCHPLGRFTEMEAVNIAETPSDLFNAILIETPLAPFFQDCMSENALDELNIELLRNKLYKSYLEAFYKFCKNHGDVTAEVMCPILEFEADRRAFIITLNSFGTELSKEDRETLYPTFGKLYPEGLRLLAQAEDFDQMKNVADHYGVYKPLFEAVGGSGGKTLEDVFYEREVQMNVLAFNRQFHYGVFYAYVKLKEQEIRNIVWIAECISQRHRTKINSYIPIL

SEQ ID NO: 27613 - protein, 26 aa, Artificial Sequence
  Synthetic polypeptide
EKKASDDWSLNLTVERKYLFQGNSTT

SEQ ID NO: 27614 - protein, 26 aa, Artificial Sequence
  Synthetic polypeptide
EKKASDDWSLNLTVERKYLFQGNSTT

SEQ ID NO: 27615 - protein, 12 aa, Artificial Sequence
  Synthetic polypeptide
RVERRRLQMIGH

SEQ ID NO: 27616 - protein, 12 aa, Artificial Sequence
  Synthetic polypeptide
RVERRRLQMIGH

SEQ ID NO: 27617 - protein, 12 aa, Artificial Sequence
  Synthetic polypeptide
RVERRRLQMIGH

SEQ ID NO: 27618 - protein, 41 aa, Artificial Sequence
  Synthetic polypeptide
LVIKFDGGEEVLISGEFNDLRKVTKEQWDTIEELIRKTKGS

SEQ ID NO: 27619 - protein, 41 aa, Artificial Sequence; identical to SEQ ID NO: 27618
  Synthetic polypeptide

SEQ ID NO: 27620 - protein, 10 aa, Artificial Sequence
  Synthetic polypeptide
EKKASDDWSL

SEQ ID NO: 27621 - protein, 3 aa, Artificial Sequence
  Synthetic polypeptide
LVI

SEQ ID NO: 27622 - protein, 74 aa, Artificial Sequence
  Synthetic polypeptide
PPPLPTREQPPLTVIFHFLSKSYKTAPPLSPFADSLFGLSPPAPRKWLPGRKGAAELDPGAPAGAKEGWIGVIT

SEQ ID NO: 27623 - protein, 265 aa, Artificial Sequence
  Synthetic polypeptide
FSISFPNPIKRPHPYLPSLTLFLDSAHLHPGSGYLEGKELQNLIQELQQARKKAGLELSPEMKTFVDQYGQRDDGKIGIVELAHVLPTEENFLLLFRCQQLKSCEEFMKTWRKYDTDHSGFIETEELKNFLKDLLEKANKTVDDTKLAEYTDLMLKLFDSNNDGKLELTEMARLLPVQENFLLKFQGIKMCGKEFNKAFELYDQDGNGYIDENELDALLKDLCEKNKQDLDINNITTYKKNIMALSDGGKLYRTDLALILCAGDN

SEQ ID NO: 27624 - protein, 23 aa, Artificial Sequence
  Synthetic polypeptide
LSFWTQPTCTQEVVTWKERSCRT

SEQ ID NO: 27625 - protein, 52 aa, Artificial Sequence
  Synthetic polypeptide
RLKIDAASLPQKPHRPSRTPSFRKWLPGRKGAAELDPGAPAGAKEGWIGVIT

SEQ ID NO: 27626 - protein, 255 aa, Artificial Sequence
  Synthetic polypeptide
RLMLPHCLRSPIDHHGRQASGSGYLEGKELQNLIQELQQARKKAGLELSPEMKTFVDQYGQRDDGKIGIVELAHVLPTEENFLLLFRCQQLKSCEEFMKTWRKYDTDHSGFIETEELKNFLKDLLEKANKTVDDTKLAEYTDLMLKLFDSNNDGKLELTEMARLLPVQENFLLKFQGIKMCGKEFNKAFELYDQDGNGYIDENELDALLKDLCEKNKQDLDINNITTYKKNIMALSDGGKLYRTDLALILCAGDN

SEQ ID NO: 27627 - protein, 20 aa, Artificial Sequence
  Synthetic polypeptide
TITDAKLPEVVTWKERSCRT

SEQ ID NO: 27628 - protein, 23 aa, Artificial Sequence
  Synthetic polypeptide
LSFWTQPTCTQEVVTWKERSCRT

SEQ ID NO: 27629 - protein, 74 aa, Artificial Sequence
  Synthetic polypeptide
PLPLPTREQPPLAVIFHYLSKSYKTAPPLSPFADSLFGLSPPAPRKWLPGRKGAAELDPGAPAGAKEGWIGVIT

SEQ ID NO: 27630 - protein, 265 aa, Artificial Sequence
  Synthetic polypeptide
FSITFPNPIKRPHPYLPSLTLFLDSAHLHPGSGYLEGKELQNLIQELQQARKKAGLELSPEMKTFVDQYGQRDDGKIGIVELAHVLPTEENFLLLFRCQQLKSCEEFMKTWRKYDTDHSGFIETEELKNFLKDLLEKANKTVDDTKLAEYTDLMLKLFDSNNDGKLELTEMARLLPVQENFLLKFQGIKMCGKEFNKAFELYDQDGNGYIDENELDALLKDLCEKNKQDLDINNITTYKKNIMALSDGGKLYRTDLALILCAGDN

SEQ ID NO: 27631 - protein, 37 aa, Artificial Sequence
  Synthetic polypeptide
MGEIIFETVVYCMIPFIRRSQKENNIHGKQFIRLLKK

SEQ ID NO: 27632 - protein, 37 aa, Artificial Sequence; identical to SEQ ID NO: 27631
  Synthetic polypeptide

SEQ ID NO: 27633 - protein, 37 aa, Artificial Sequence; identical to SEQ ID NO: 27631
  Synthetic polypeptide

SEQ ID NO: 27634 - protein, 21 aa, Artificial Sequence
  Synthetic polypeptide
FHLFDVLKKKTIFMENSSFGS

SEQ ID NO: 27635 - protein, 21 aa, Artificial Sequence
  Synthetic polypeptide
FHLFDVLKKKTIFMENSSFGS

SEQ ID NO: 27636 - protein, 21 aa, Artificial Sequence
  Synthetic polypeptide
FHLFDVLKKKTIFMENSSFGS

SEQ ID NO: 27637 - protein, 21 aa, Artificial Sequence
  Synthetic polypeptide
FHLFDVLKKKTIFMENSSFGS

SEQ ID NO: 27638 - protein, 21 aa, Artificial Sequence
  Synthetic polypeptide
FHLFDVLKKKTIFMENSSFGS

SEQ ID NO: 27639 - protein, 832 aa, Artificial Sequence
  Synthetic polypeptide
NGCILYDSIYSTFSKRKQYSWKTVHSAPKEVAVSKEQEEKSDSLVKYFSVVWCKPSKKKHKKWEGDAVLIVKGKSFILKNLEGKDIGRGIGYKFKELEKIEEGQTLMICGKEIEVMGVISPDDFSSGRCFQLGGGSTAISHSSQVARKCFSNPFKSVCKPSSKENRQNDFQNCKPRHDPYTPNSLVMPRPDKNHQWVFNKNCFPLVDVVIDPYLVYHLRPHQKEGIIFLYECVMGMRMNGRCGAILADEMGLGKTLQCISLIWTLQCQGPYGGKPVIKKTLIVTPGSLVNNWKKEFQKWLGSERIKIFTVDQDHKVEEFIKSIFYSVLIISYEMLLRSLDQIKNIKFDLLICDEGHRLKNSAIKTTTALISLSCEKRIILTGTPIQNDLQEFFALIDFVNPGILGSLSSYRKIYEEPIILSREPSASEEEKELGERRAAELTCLTGLFILRRTQEIINKYLPPKIENVVFCRPGALQIELYRKLLNSQVVRFCLQGLLENSPHLICIGALKKLCNHPCLLFNSIKEKECSSTCDKNEEKSLYKGLLSVFPADYNPLLFTEKESGKLQVLSKLLAVIHELRPTEKVVLVSNYTQTLNILQEVCKRHGYAYTRLDGQTPISQRQQIVDGFNSQHSSFFIFLLSSKAGGVGLNLIGGSHLILYDIDWNPATDIQAMSRVWRDGQKYPVHIYRLLTTGTIEEKIYQRQISKQGLCGAVVDLTKTSEHIQFSVEELKNLFTLHESSDCVTHDLLDCECTGEEVHTGDSLEKFIVSRDCQLGPHHQKSNSLKPLSMSQLKQWKHFSGDHLNLTDPFLERITENVSFIFQNITTQATGT

SEQ ID NO: 27640 - protein, 35 aa, Artificial Sequence
  Synthetic polypeptide
MGEIIFETVVYCMIPFIRRSQKENNIHGKQFIRLL

SEQ ID NO: 27641 - protein, 35 aa, Artificial Sequence; identical to SEQ ID NO: 27640
  Synthetic polypeptide

SEQ ID NO: 27642 - protein, 28 aa, Artificial Sequence
  Synthetic polypeptide
NGCILYDSIYSTFSKRKQYSWKTVHSAP

SEQ ID NO: 27643 - protein, 28 aa, Artificial Sequence
  Synthetic polypeptide
NGCILYDSIYSTFSKRKQYSWKTVHSAP

SEQ ID NO: 27644 - protein, 31 aa, Artificial Sequence
  Synthetic polypeptide
NGCILYDSIYSTFSKRKQYSWKTVHSAPKEV

SEQ ID NO: 27645 - protein, 47 aa, Artificial Sequence
  Synthetic polypeptide
NGCILYDSIYSTFSKRKQYSWKTVHSAPKEVAVSKEQEEKSDSLVKY

SEQ ID NO: 27646 - protein, 21 aa, Artificial Sequence
  Synthetic polypeptide
EVKAGGLLEAWSLRPDWSGCV

SEQ ID NO: 27647 - protein, 21 aa, Artificial Sequence
  Synthetic polypeptide
EVKAGGLLEAWSLRPDWSGCV

SEQ ID NO: 27648 - protein, 21 aa, Artificial Sequence
  Synthetic polypeptide
EVKAGGLLEAWSLRPDWSGCV

SEQ ID NO: 27649 - protein, 13 aa, Artificial Sequence
  Synthetic polypeptide
DQTGQDVFERCMV

SEQ ID NO: 27650 - protein, 13 aa, Artificial Sequence
  Synthetic polypeptide
DQTGQDVFERCMV

SEQ ID NO: 27651 - protein, 39 aa, Artificial Sequence
  Synthetic polypeptide
PGVVTHTCNLSTLRGQGRRIARGLEFETRLVRMCLKDVW

SEQ ID NO: 27652 - protein, 39 aa, Artificial Sequence; identical to SEQ ID NO: 27651
  Synthetic polypeptide

SEQ ID NO: 27653 - protein, 8 aa, Artificial Sequence
  Synthetic polypeptide
DQTGQDVF

SEQ ID NO: 27654 - protein, 35 aa, Artificial Sequence
  Synthetic polypeptide
PGVVTHTCNLSTLRGQGRRIARGLEFETRLVRMCL

SEQ ID NO: 27655 - protein, 8 aa, Artificial Sequence
  Synthetic polypeptide
SQGRYNKN

SEQ ID NO: 27656 - protein, 8 aa, Artificial Sequence
  Synthetic polypeptide
SQGRYNKN

SEQ ID NO: 27657 - protein, 530 aa, Artificial Sequence
  Synthetic polypeptide
PGVVAGTCSPRVDTTRIEYSIPLRENWALPYFACQIAALTGYLKSNLNTYGERFCYLLMSASTYTFMMMWEYSHYLLFLQAISLFLLDTFSVEQSDKVYEVYKIYIFSLFLGYLLQFENPALLVSPLLSLVAALMLAKCLQLNVKKGSFVAKIIKVINFYLVCTLTITLNIIMKMFVPHKENGHMLKFLEVKFGLNMTKNFTMNWLLCQESLQAPSQDFFLRLTQSSLLPFYILVLIICFLSMLQVIFRRINGKSLKETVTLEDGRIGERPEIIYHVIHTILLGSLAMVIEGLKYIWIPYVCMLAAFGVCSPELWMTLFKWLRLRTVHPILLALILSMAVPTIIGLSLWKEFFPRLMTELMELQEFYDPDTVELMTWIKRQAPVAAVFAGSPQLMGAIKLCTGWMVTSLPLYNDDDLLKRNENIYQIYSKRSAEDIYKILTSYKANYLIVEDAICNEVGPMRGCRVKDLLDIANGHMVCEEGDKLTYSKYGRFCHEVKINYSPYVNYFTRVYWNRSYFVYKINTVISFQS

SEQ ID NO: 27658 - protein, 54 aa, Artificial Sequence
  Synthetic polypeptide
AVAQACNPNTLGGRGRWITRSGVEDQPGQHSETSSLLKIQKISQAWWQAPVVPG

SEQ ID NO: 27659 - protein, 54 aa, Artificial Sequence; identical to SEQ ID NO: 27658
  Synthetic polypeptide

SEQ ID NO: 27660 - protein, 239 aa, Artificial Sequence
  Synthetic polypeptide
PGVVAGTCSPRVDTTRIEYSIPLRENWALPYFACQIAALTGYLKSNLNTYGERFCYLLMSASTYTFMMMWEYSHYLLFLQAISLFLLDTFSVEQSDKLNVKKGSFVAKIIKVINFYLVCTLTITLNIIMKMFVPHKENGHMLKFLEVKFGLNMTKNFTMNWLLCQESLQAPSQDFFLRLTQSSLLPFYILVLIICFLSMLQVIFRRINGKSLKETVTLEDGRIGERPEIIYHVIHTILL

SEQ ID NO: 27661 - protein, 42 aa, Artificial Sequence
  Synthetic polypeptide
RHDISAAFQPKIHDAYPEYLITYQIMKPEAPSQTATAAEQKT

SEQ ID NO: 27662 - protein, 42 aa, Artificial Sequence; identical to SEQ ID NO: 27661
  Synthetic polypeptide

SEQ ID NO: 27663 - protein, 36 aa, Artificial Sequence
  Synthetic polypeptide
AYIISLGGYSKGTTSLQHSSQKYMMHTQSILSLTRS

SEQ ID NO: 27664 - protein, 36 aa, Artificial Sequence; identical to SEQ ID NO: 27663
  Synthetic polypeptide

SEQ ID NO: 27665 - protein, 25 aa, Artificial Sequence
  Synthetic polypeptide
GQAQWLTPVTPALWDAMAGSFEARF

SEQ ID NO: 27666 - protein, 25 aa, Artificial Sequence
  Synthetic polypeptide
GQAQWLTPVTPALWDAMAGSFEARF

SEQ ID NO: 27667 - protein, 25 aa, Artificial Sequence
  Synthetic polypeptide
GQAQWLTPVTPALWDAMAGSFEARF

SEQ ID NO: 27668 - protein, 50 aa, Artificial Sequence
  Synthetic polypeptide
PQRFGMPWQDHLRPGSEDSPPKHAGNNESHSSRRRNRHSKSKVTNGVGKK

SEQ ID NO: 27669 - protein, 50 aa, Artificial Sequence; identical to SEQ ID NO: 27668
  Synthetic polypeptide

SEQ ID NO: 27670 - protein, 38 aa, Artificial Sequence
  Synthetic polypeptide
GQVLKTAHPSMQATTKAILPGEGIGIPSQKSPMALERN

SEQ ID NO: 27671 - protein, 38 aa, Artificial Sequence; identical to SEQ ID NO: 27670
  Synthetic polypeptide

SEQ ID NO: 27672 - protein, 81 aa, Artificial Sequence
  Synthetic polypeptide
PQRFGMPWQDHLRPGSEDSPPKHAGEGTWGSLFEIVSLVSHRPGRVRQIIAWGAFANVGSLLTSALDMRSPVAARCVEGKR

SEQ ID NO: 27673 - protein, 23 aa, Artificial Sequence
  Synthetic polypeptide
GQVLKTAHPSMQARALGGHYLRS

SEQ ID NO: 27674 - protein, 215 aa, Artificial Sequence
  Synthetic polypeptide
RADACVCVCCSLLYGAWARGNEIINAVVLLILLSALADPDQYNFSSSELGGDFEFMDDANMCIAIAISLLMILICAMATYGAYKQRAAWIIPFFCYQIFDFALNMLVAITVLIYPNSIQEYIRQLPPNFPYRDDVMSVNPTCLVLIILLFISIILTFKGYLISCVWNCYRYINGRNSSDVLVYVTSNDTTVLLPPYDDATVNGAAKEPPPPYVSA

SEQ ID NO: 27675 - protein, 215 aa, Artificial Sequence; identical to SEQ ID NO: 27674
  Synthetic polypeptide

SEQ ID NO: 27676 - protein, 29 aa, Artificial Sequence
  Synthetic polypeptide
GLMPVFVCVVHCSMVPGPGGMRSSMLWYC

SEQ ID NO: 27677 - protein, 29 aa, Artificial Sequence
  Synthetic polypeptide
GLMPVFVCVVHCSMVPGPGGMRSSMLWYC

SEQ ID NO: 27678 - protein, 29 aa, Artificial Sequence
  Synthetic polypeptide
GLMPVFVCVVHCSMVPGPGGMRSSMLWYC

SEQ ID NO: 27679 - protein, 141 aa, Artificial Sequence
  Synthetic polypeptide
RADACVCVCCSLLYGAWARGNEIINAVVLLILLSALADPDQYNFSSSELGGDFEFMDDAKILFNLSADMCIAIAISLLMILICAMATYGAYKQRAAWIIPFFCYQIFDFALNMLVAITVLIYPNSIQEYIRQLPPNFPYRD

SEQ ID NO: 27680 - protein, 30 aa, Artificial Sequence
  Synthetic polypeptide
KSLGWKFLFSSLFENLSWTIANQMMEKLRA

SEQ ID NO: 27681 - protein, 41 aa, Artificial Sequence
  Synthetic polypeptide
RKDWRNRQQNMNSAWPFKKALDGNSYFLLCSRTCLGQLQIK

SEQ ID NO: 27682 - protein, 251 aa, Artificial Sequence
  Synthetic polypeptide
TVLGPLKKPWMEILIFFSVRELVLDNCKSNDGKIEGLTAEFVNLEFLSLINVGLISVSNLPKLPKLKKLELSENRIFGGLDMLAEKLPNLTHLNLSGNKLKDISTLEPLKKLECLKSLDLFNCEVTNLNDYRESVFKLLPQLTYLDGYDREDQEAPDSDAEVDGVDEEEEDEEGEDEEDEDDEDGEEEEFDEEDDEDEDVEGDEDDDEVSEEEEEFGLDEEDEDEDEDEEEEEGGKGEKRKRETDDEGEDD

SEQ ID NO: 27683 - protein, 58 aa, Artificial Sequence
  Synthetic polypeptide
NLGFGNSQGFLFFTPLFHFSSVLTQEKKSLAKLIKGTREQTQYPRSVGLIVLSSRRVS

SEQ ID NO: 27684 - protein, 15 aa, Artificial Sequence
  Synthetic polypeptide
SREPESKPNILGVWG

SEQ ID NO: 27685 - protein, 21 aa, Artificial Sequence
  Synthetic polypeptide
RHCATLVRSVGLIVLSSRRVS

SEQ ID NO: 27686 - protein, 5 aa, Artificial Sequence
  Synthetic polypeptide
SGVWG

SEQ ID NO: 27687 - protein, 332 aa, Artificial Sequence
  Synthetic polypeptide
RKGIWPALLETLCNFSQECGADCAKFQKSELEFKFNRKALERPYTSKHSWGKTYGEHKRHLEFSHDQYRELQRYAEEVGIFFTASGMDEMAVEFLHELNVPFFKVGSGDTNNFPYLEKTAKKGRPMVISSGMQSMDTMKQVYQIVKPLNPNFCFLQCTSAYPLQPEDVNLRVISEYQKLFPDIPIGYSGHETGIAISVAAVALGAKVLERHITLDKTWKGSDHSASLEPGELAELVRSVRLVERALGSPTKQLLPCEMACNEKLGKSVVAKVKIPEGTILTMDMLTVKVGEPKGYPPEDIFNLVGKKVLVTVEEDDTIMEELVDNHGKKIKS

SEQ ID NO: 27688 - protein, 22 aa, Artificial Sequence
  Synthetic polypeptide
QNYDSGEQMSSCQRWQLNSCMN

SEQ ID NO: 27689 - protein, 7 aa, Artificial Sequence
  Synthetic polypeptide
VVAKDGS

SEQ ID NO: 27690 - protein, 246 aa, Artificial Sequence
  Synthetic polypeptide
LPKMAVEFLHELNVPFFKVGSGDTNNFPYLEKTAKKGRPMVISSGMQSMDTMKQVYQIVKPLNPNFCFLQCTSAYPLQPEDVNLRVISEYQKLFPDIPIGYSGHETGIAISVAAVALGAKVLERHITLDKTWKGSDHSASLEPGELAELVRSVRLVERALGSPTKQLLPCEMACNEKLGKSVVAKVKIPEGTILTMDMLTVKVGEPKGYPPEDIFNLVGKKVLVTVEEDDTIMEELVDNHGKKIKS

SEQ ID NO: 27691 - protein, 408 aa, Artificial Sequence
  Synthetic polypeptide
PRIRDVLVPAHPPTCHMTLGKLPHLQMPPLEKNTRKLSQECLKQLAIKKQQHIDNITQIEDATEKLKANAESSKTWLKGKFTELRLLLDEEEALAKKFIDKNTQLTLQVYREQADSCREQLDIMNDLSNRVWSISQEPDPVQRLQAYTATEQEMQQQMSLGELCHPVPLSFEPVKSFFKGLVEAVESTLQTPLDIRLKESINCQLSDPSSTKPGTLLKTSPSPERSLLLKYARTPTLDPDTMHARLRLSADRLTVRCGLLGSLGPVPVLRFDALWQVLARDCFATGRHYWEVDVQEAGAGWWVGAAYASLRRRGASAAARLGCNRQSWCLKRYDLEYWAFHDGQRSRLRPRDDLDRLGVFLDYEAGVLAFYDVTGGMSHLHTFRATFQEPLYPALRLWEGAISIPRLP

SEQ ID NO: 27692 - protein, 408 aa, Artificial Sequence; identical to SEQ ID NO: 27691
  Synthetic polypeptide

SEQ ID NO: 27693 - protein, 408 aa, Artificial Sequence; identical to SEQ ID NO: 27691
  Synthetic polypeptide

SEQ ID NO: 27694 - protein, 24 aa, Artificial Sequence
  Synthetic polypeptide
LWASYLTFRCLHWKRIQGNSAKNV

SEQ ID NO: 27695 - protein, 24 aa, Artificial Sequence
  Synthetic polypeptide
LWASYLTFRCLHWKRIQGNSAKNV

SEQ ID NO: 27696 - protein, 24 aa, Artificial Sequence
  Synthetic polypeptide
LWASYLTFRCLHWKRIQGNSAKNV

SEQ ID NO: 27697 - protein, 52 aa, Artificial Sequence
  Synthetic polypeptide
EDQRCPSPSSSTNLPYDFGQVTSPSDASIGKEYKETQPRMFKAAGNQEAAAH

SEQ ID NO: 27698 - protein, 52 aa, Artificial Sequence; identical to SEQ ID NO: 27697
  Synthetic polypeptide

SEQ ID NO: 27699 - protein, 52 aa, Artificial Sequence; identical to SEQ ID NO: 27697
  Synthetic polypeptide

SEQ ID NO: 27700 - protein, 101 aa, Artificial Sequence
  Synthetic polypeptide
QSCRIHMVHLSHRPGLLRDMETKRGMMCGSSLASLTRIWQQKCSVVHTRRTCMVVNISGSFRAGTSLLGGSRCTRKPTHPAASGRICLLPWRATLAWISSP

SEQ ID NO: 27701 - protein, 25 aa, Artificial Sequence
  Synthetic polypeptide
KAAEYTWCIFLTGQVCSETWRRKGE

SEQ ID NO: 27702 - protein, 720 aa, Artificial Sequence
  Synthetic polypeptide
KLQNTHGASFSQARFAQRHGDEKGNDVRIILGQFDQNMAAKVFCCAYEENMYGSKYQWIIPGWYEPSWWEQVHTEANSSRCLRKNLLAAMEGYIGVDFEPLSSKQIKTISGKTPQQYEREYNNKRSGVGPSKFHGYAYDGIWVIAKTLQRAMETLHASSRHQRIQDFNYTDHTLGRIILNAMNETNFFGVTGQVVFRNGERMGTIKFTQFQDSREVKVGEYNAVADTLEIINDTIRFQGSEPPKDKTIILEQLRKISLPLYSILSALTILGMIMASAFLFFNIKNRNQKLIKMSSPYMNNLIILGGMLSYASIFLFGLDGSFVSEKTFETLCTVRTWILTVGYTTAFGAMFAKTWRVHAIFKNVKMKKKIIKDQKLLVIVGGMLLIDLCILICWQAVDPLRRTVEKYSMEPDPAGRDISIRPLLEHCENTHMTIWLGIVYAYKGLLMLFGCFLAWETRNVSIPALNDSKYIGMSVYNVGIMCIIGAAVSFLTRDQPNVQFCIVALVIIFCSTITLCLVFVPKLITLRTNPDAATQNRRFQFTQNQKKEDSKTSTSVTSVNQASTSRLEGLQSENHRLRMKITELDKDLEEVTMQLQDTPEKTTYIKQNHYQELNDILNLGNFTESTDGGKAILKNHLDQNPQLQWNTTEPSRTCKDPIEDINSPEHIQRRLSLQLPILHHAYLPSIGGVDASCVSPCVSPTASPRHRHVPPSFRVMVSGL

SEQ ID NO: 27703 - protein, 1358 aa, Artificial Sequence
  Synthetic polypeptide
GHPETASQGHLDLTQLIGVPLPSSVSFVTGYGGFPAYSFGPGANVGRPARTLIPSTFFRDFAISVVVKPSSTRGGVLFAITDAFQKVIYLGLRLSGVEDGHQRIILYYTEPGSHVSQEAAAFSVPVMTHRWNRFAMIVQGEEVTLLVNCEEHSRIPFQRSSQALAFESSAGIFMGNAGATGLERFTGSLQQLTVHPDPRTPEELCDPEESSASGETSGLQEADGVAEILEAVTYTQASPKEAKVEPINTPPTPSSPFEDMELSGEPVPEGTLETTNMSIIQHSSPKQGSGEILNDTLEGVHSVDGDPITDSGSGAGAFLDIAEEKNLAATAAGLAEVPISTAGEAEASSVPTGGPTLSMSTENPEEGVTPGPDNEERLAATAAGEAEALASMPGEVEASGVAPGELDLSMSAQSLGEEATVGPSSEDSLTTAAAATEVSLSTFEDEEASGVPTDGLAPLTATMAPERAVTSGPGDEEDLAAATTEEPLITAGGEESGSPPPDGPPLPLPTVAPERWITPAQREHVGMKGQAGPKGEKGDAGEELPGPPEPSGPVGPTAGAEAEGSGLGWGSDVGSGSGDLVGSEQLLRGPPGPPGPPGLPGIPGKPGTDVFMGPPGSPGEDGPAGEPGPPGPEGQPGVDGATGLPGMKGEKGARGPNGSVGEKGDPGNRGLPGPPGKKGQAGPPGVMGPPGPPGPPGPPGPGCTMGLGFEDTEGSGSTQLLNEPKLSRPTAAIGLKGEKGDRGPKGERGMDGASIVGPPGPRGPPGHIKVLSNSLINITHGFMNFSDIPELVGPPGPDGLPGLPGFPGPRGPKGDTGLPGFPGLKGEQGEKGEPGAILTEDIPLERLMGKKGEPGMHGAPGPMGPKGPPGHKGEFGLPGRPGRPGLNGLKGTKGDPGVIMQGPPGLPGPPGPPGPPGAVINIKGAIFPIPVRPHCKMPVDTAHPGSPELITFHGVKGEKGSWGLPGSKGEKGDQGAQGPPGPPLDLAYLRHFLNNLKGENGDKGFKGEKGEKGDINGSFLMSGPPGLPGNPGPAGQKGETVVGPQGPPGAPGLPGPPGFGRPGDPGPPGPPGPPGPPAILGAAVALPGPPGPPGQPGLPGSRNLVTAFSNMDDMLQKAHLVIEGTFIYLRDSTEFFIRVRDGWKKLQLGELIPIPADSPPPPALSSNPHQLLPPPNPISSANYEKPALHLAALNMPFSGDIRADFQCFKQARAAGLLSTYRAFLSSHLQDLSTIVRKAERYSLPIVNLKGQVLFNNWDSIFSGHGGQFNMHIPIYSFDGRDIMTDPSWPQKVIWHGSSPHGVRLVDNYCEAWRTADTAVTGLASPLSTGKILDQKAYSCANRLIVLCIENSFMTDARK

SEQ ID NO: 27704 - protein, 96 aa, Artificial Sequence
  Synthetic polypeptide
QLLSAVRLQSVLALESFLPSIQRRGRTSAKVIQRLLPRVTWTSRSSSVSRCPRPYPLSQAMVASRPTVSGLVPMLAAQPGLSSHPPSSGTSPSASW

SEQ ID NO: 27705 - protein, 111 aa, Artificial Sequence
  Synthetic polypeptide
NNCCLRLDSSQSWLWKASSRLYNEEVGPALRSSRDCFPGSPGPHAAHRCPAALVRILCHRLWWLPGLQFRAWCQCWPPSQDSHPIHLLQGLRHQRRGEAQQHPWWRALRHH

SEQ ID NO: 27706 - protein, 80 aa, Artificial Sequence
  Synthetic polypeptide
KQRDCFPGSPGPHAAHRCPAALVRILCHRLWWLPGLQFRAWCQCWPPSQDSHPIHLLQGLRHQRRGEAQQHPWWRALRHH

SEQ ID NO: 27707 - protein, 1372 aa, Artificial Sequence
  Synthetic polypeptide
LCDLIPLHLNLLIYKNKETASQGHLDLTQLIGVPLPSSVSFVTGYGGFPAYSFGPGANVGRPARTLIPSTFFRDFAISVVVKPSSTRGGVLFAITDAFQKVIYLGLRLSGVEDGHQRIILYYTEPGSHVSQEAAAFSVPVMTHRWNRFAMIVQGEEVTLLVNCEEHSRIPFQRSSQALAFESSAGIFMGNAGATGLERFTGSLQQLTVHPDPRTPEELCDPEESSASGETSGLQEADGVAEILEAVTYTQASPKEAKVEPINTPPTPSSPFEDMELSGEPVPEGTLETTNMSIIQHSSPKQGSGEILNDTLEGVHSVDGDPITDSGSGAGAFLDIAEEKNLAATAAGLAEVPISTAGEAEASSVPTGGPTLSMSTENPEEGVTPGPDNEERLAATAAGEAEALASMPGEVEASGVAPGELDLSMSAQSLGEEATVGPSSEDSLTTAAAATEVSLSTFEDEEASGVPTDGLAPLTATMAPERAVTSGPGDEEDLAAATTEEPLITAGGEESGSPPPDGPPLPLPTVAPERWITPAQREHVGMKGQAGPKGEKGDAGEELPGPPEPSGPVGPTAGAEAEGSGLGWGSDVGSGSGDLVGSEQLLRGPPGPPGPPGLPGIPGKPGTDVFMGPPGSPGEDGPAGEPGPPGPEGQPGVDGATGLPGMKGEKGARGPNGSVGEKGDPGNRGLPGPPGKKGQAGPPGVMGPPGPPGPPGPPGPGCTMGLGFEDTEGSGSTQLLNEPKLSRPTAAIGLKGEKGDRGPKGERGMDGASIVGPPGPRGPPGHIKVLSNSLINITHGFMNFSDIPELVGPPGPDGLPGLPGFPGPRGPKGDTGLPGFPGLKGEQGEKGEPGAILTEDIPLERLMGKKGEPGMHGAPGPMGPKGPPGHKGEFGLPGRPGRPGLNGLKGTKGDPGVIMQGPPGLPGPPGPPGPPGAVINIKGAIFPIPVRPHCKMPVDTAHPGSPELITFHGVKGEKGSWGLPGSKGEKGDQGAQGPPGPPLDLAYLRHFLNNLKGENGDKGFKGEKGEKGDINGSFLMSGPPGLPGNPGPAGQKGETVVGPQGPPGAPGLPGPPGFGRPGDPGPPGPPGPPGPPAILGAAVALPGPPGPPGQPGLPGSRNLVTAFSNMDDMLQKAHLVIEGTFIYLRDSTEFFIRVRDGWKKLQLGELIPIPADSPPPPALSSNPHQLLPPPNPISSANYEKPALHLAALNMPFSGDIRADFQCFKQARAAGLLSTYRAFLSSHLQDLSTIVRKAERYSLPIVNLKGQVLFNNWDSIFSGHGGQFNMHIPIYSFDGRDIMTDPSWPQKVIWHGSSPHGVRLVDNYCEAWRTADTAVTGLASPLSTGKILDQKAYSCANRLIVLCIENSFMTDARK

SEQ ID NO: 27708 - protein, 76 aa, Artificial Sequence
  Synthetic polypeptide
SLCTSTSSSIKTKRLLPRVTWTSRSSSVSRCPRPYPLSQAMVASRPTVSGLVPMLAAQPGLSSHPPSSGTSPSASW

SEQ ID NO: 27709 - protein, 67 aa, Artificial Sequence
  Synthetic polypeptide
VHVLCRDMDEAGNHHSQQTIARTKNQTPHVLTHSLSSWLGQCCLPTTSNALTLFRCISKDSSVRTET

SEQ ID NO: 27710 - protein, 67 aa, Artificial Sequence; identical to SEQ ID NO: 27709
  Synthetic polypeptide

SEQ ID NO: 27711 - protein, 67 aa, Artificial Sequence; identical to SEQ ID NO: 27709
  Synthetic polypeptide

SEQ ID NO: 27712 - protein, 58 aa, Artificial Sequence
  Synthetic polypeptide
YAAIKNDEFMSFVGTWMKLETIILSKLSPGRKTKHHMFSLIACHHGWDSAACLLLRMH

SEQ ID NO: 27713 - protein, 58 aa, Artificial Sequence; identical to SEQ ID NO: 27712
  Synthetic polypeptide

SEQ ID NO: 27714 - protein, 58 aa, Artificial Sequence; identical to SEQ ID NO: 27712
  Synthetic polypeptide

SEQ ID NO: 27715 - protein, 507 aa, Artificial Sequence
  Synthetic polypeptide
RSILLGRKDLNFEISLGAPIPFFHRCAPVNISCYAKFAEALITFVSDNSVLHRLISGVMTSKEIILGLCLLSLVLSMILMVIIRYISRVLVWILTILVILGSLGGTGVLWWLYAKQRRSPKETVTPEQLQIAEDNLRALLIYAISATVFTVILFLIMLVMRKRVALTIALFHVAGKVFIHLPLLVFQPFWTFFALVLFWVYWIMTLLFLGTTGSPVQNEQGFVEFKISGPLQYMWWYHVVGLIWISEFILACQQMTVAGAVVTYYFTRDKRNLPFTPILASVNRLIRYHLGTVAKGSFIITLVKIPRMILMYIHSQLKGKENACARCVLKSCICCLWCLEKCLNYLNQNAYTATAINSTNFCTSAKDAFVILVENALRVATINTVGDFMLFLGKVLIVCSTGLAGIMLLNYQQDYTVWVLPLIIVCLFAFLVAHCFLSIYEMVVDVLFLCFAIDTKYNDGSPGREFYMDKVLMEFVENSRKAMKEAGKGGVADSRELKPMASGASSA

SEQ ID NO: 27716 - protein, 507 aa, Artificial Sequence; identical to SEQ ID NO: 27715
  Synthetic polypeptide

SEQ ID NO: 27717 - protein, 14 aa, Artificial Sequence
  Synthetic polypeptide
VWVHLFHSSIAVLL

SEQ ID NO: 27718 - protein, 14 aa, Artificial Sequence
  Synthetic polypeptide
VWVHLFHSSIAVLL

SEQ ID NO: 27719 - protein, 14 aa, Artificial Sequence
  Synthetic polypeptide
VWVHLFHSSIAVLL

SEQ ID NO: 27720 - protein, 14 aa, Artificial Sequence
  Synthetic polypeptide
VWVHLFHSSIAVLL

SEQ ID NO: 27721 - protein, 33 aa, Artificial Sequence
  Synthetic polypeptide
DKSGCTYSILPSLCSCEHFLLCQVCRGPDHLCQ

SEQ ID NO: 27722 - protein, 33 aa, Artificial Sequence; identical to SEQ ID NO: 27721
  Synthetic polypeptide

SEQ ID NO: 27723 - protein, 33 aa, Artificial Sequence; identical to SEQ ID NO: 27721
  Synthetic polypeptide

SEQ ID NO: 27724 - protein, 33 aa, Artificial Sequence; identical to SEQ ID NO: 27721
  Synthetic polypeptide

SEQ ID NO: 27725 - protein, 502 aa, Artificial Sequence
  Synthetic polypeptide
RSILLGRKDLNFEISLGAPIPFFHRCAPVNISCYAKFAEALITFVSDNSVLHRLISGVMTSKEIILGLCLLSLVLSMILMVIIRYISRVLVWILTILVILGSLGGTGVLWWLYAKQRRSPKETVTPEQLQIAEDNLRALLIYAISATVFTVILFLIMLVMRKRVALTIALFHVAGKVFIHLPLLVFQPFWTFFALVLFWVYWIMTLLFLGTTGSPVQNEQGFVEFKISGPLQYMWWYHVVGLIWISEFILACQQMTVAGAVVTYYFTRDKRNLPFTPILASVNRLIRYHLGTVAKGSFIITLVKIPRMILMYIHSQLKGKENACARCVLKSCICCLWCLEKCLNYLNQNAYTATAINSTNFCTSAKDAFVILVENALRVATINTVGDFMLFLGKVLIVCSTGLAGIMLLNYQQDYTVWVLPLIIVCLFAFLVAHCFLSIYEMVVDVLFLCFAIDTKYNDGSPGREFYMDKVLMEFVENSRKAMKEAGKGGVADSRELKPMIK

SEQ ID NO: 27726 - protein, 504 aa, Artificial Sequence
  Synthetic polypeptide
RSILLGRKDLNFEISLGAPIPFFHRCAPVNISCYAKFAEALITFVSDNSVLHRLISGVMTSKEIILGLCLLSLVLSMILMVIIRYISRVLVWILTILVILGSLGGTGVLWWLYAKQRRSPKETVTPEQLQIAEDNLRALLIYAISATVFTVILFLIMLVMRKRVALTIALFHVAGKVFIHLPLLVFQPFWTFFALVLFWVYWIMTLLFLGTTGSPVQNEQGFVEFKISGPLQYMWWYHVVGLIWISEFILACQQMTVAGAVVTYYFTRDKRNLPFTPILASVNRLIRYHLGTVAKGSFIITLVKIPRMILMYIHSQLKGKENACARCVLKSCICCLWCLEKCLNYLNQNAYTATAINSTNFCTSAKDAFVILVENALRVATINTVGDFMLFLGKVLIVCSTGLAGIMLLNYQQDYTVWVLPLIIVCLFAFLVAHCFLSIYEMVVDVLFLCFAIDTKYNDGSPGREFYMDKVLMEFVENSRKAMKEAGKGGVADSRELKPMLKKR

SEQ ID NO: 27727 - protein, 141 aa, Artificial Sequence
  Synthetic polypeptide
GQAQWLAPIIPAYWEAEVKALKEKIESEKGKDAFPVAGQKLIYAGKILNDDTALKEYKIDEKNFVVVMVTKPKAVSTPAPATTQQSAPASTTAVTSSTTTTVAQAPTPVPALAPTSTPASITPASATASSEPAPASAAKQE

SEQ ID NO: 27728 - protein, 8 aa, Artificial Sequence
  Synthetic polypeptide
SQHIGRPR

SEQ ID NO: 27729 - protein, 8 aa, Artificial Sequence
  Synthetic polypeptide
SQHIGRPR

SEQ ID NO: 27730 - protein, 8 aa, Artificial Sequence
  Synthetic polypeptide
SQHIGRPR

SEQ ID NO: 27731 - protein, 24 aa, Artificial Sequence
  Synthetic polypeptide
PGAVACAYNPSILGGRGESTERED

SEQ ID NO: 27732 - protein, 24 aa, Artificial Sequence
  Synthetic polypeptide
PGAVACAYNPSILGGRGESTERED

SEQ ID NO: 27733 - protein, 24 aa, Artificial Sequence
  Synthetic polypeptide
PGAVACAYNPSILGGRGESTERED

SEQ ID NO: 27734 - protein, 404 aa, Artificial Sequence
  Synthetic polypeptide
GQAQWLAPIIPAYWEAEVKALKEKIESEKGKDAFPVAGQKLIYAGKILNDDTALKEYKIDEKNFVVVMVTKPKAVSTPAPATTQQSAPASTTAVTSSTTTTVAQAPTPVPALAPTSTPASITPASATASSEPAPASAAKQEKPAEKPAETPVATSPTATDSTSGDSSRSNLFEDATSALVTGQSYENMVTEIMSMGYEREQVIAALRASFNNPDRAVEYLLMGIPGDRESQAVVDPPQAASTGAPQSSAVAAAAATTTATTTTTSSGGHPLEFLRNQPQFQQMRQIIQQNPSLLPALLQQIGRENPQLLQQISQHQEHFIQMLNEPVQEAGGQGGGGGGGSGGIAEAGSGHMNYIQVTPQEKEAIERLKALGFPEGLVIQAYFACEKNENLAANFLLQQNFDED

SEQ ID NO: 27735 - protein, 96 aa, Artificial Sequence
  Synthetic polypeptide
GQAQWLAPIIPAYWEAEVKALKEKIESEKGKDAFPVAGQKLIYAGKILNDDTALKEYKIDEKNFVVVMVTKPKAVSTPAPATTQQSAPASTTAVTS

SEQ ID NO: 27736 - protein, 18 aa, Artificial Sequence
  Synthetic polypeptide
IMLSFLYHQRSTEEPSGS

SEQ ID NO: 27737 - protein, 18 aa, Artificial Sequence
  Synthetic polypeptide
IMLSFLYHQRSTEEPSGS

SEQ ID NO: 27738 - protein, 68 aa, Artificial Sequence
  Synthetic polypeptide
PPLPVSSLPPLRQQDQPLHFLLYFSLLNVEMTKMKTFMMIHFHLMNNAELFIPPKINRRTQWKLSLLD

SEQ ID NO: 27739 - protein, 68 aa, Artificial Sequence; identical to SEQ ID NO: 27738
  Synthetic polypeptide

SEQ ID NO: 27740 - protein, 226 aa, Artificial Sequence
  Synthetic polypeptide
LDYEEAVLLLLEGAAWEEALRLVYKYNRLDIIETNVKPSILEAQKNYMAFLDSQTATFSRHKKRLLVVRELKEQAQQAGLDDEVPHGQESDLFSETSSVVSGSEMSGKYSHSNSRISARSSKNRRKAERKKHSLKEGSPLEDLALLEALSEVVQNTENLKDEVYHILKVLFLFEFDEQGRELQKAFEDTLQLMERSLPEIWTLTYQQNSATPTWGEGVLLCCPSWS

SEQ ID NO: 27741 - protein, 5 aa, Artificial Sequence
  Synthetic polypeptide
LLTRL

SEQ ID NO: 27742 - protein, 5 aa, Artificial Sequence
  Synthetic polypeptide
LLTRL

SEQ ID NO: 27743 - protein, 5 aa, Artificial Sequence
  Synthetic polypeptide
LLTRL

SEQ ID NO: 27744 - protein, 259 aa, Artificial Sequence
  Synthetic polypeptide
LDYEEAVLLLLEGAAWEEALRLVYKYNRLDIIETNVKPSILEAQKNYMAFLDSQTATFSRHKKRLLVVRELKEQAQQAGLDDEVPHGQESDLFSETSSVVSGSEMSGKYSHSNSRISARSSKNRRKAERKKHSLKEGSPLEDLALLEALSEVVQNTENLKDEVYHILKVLFLFEFDEQGRELQKAFEDTLQLMERSLPEIWTLTYQQNSATPVLGPNSTANSIMASYQQQKTSVPVLDAELFIPPKINRRTQWKLSLLD

SEQ ID NO: 27745 - protein, 259 aa, Artificial Sequence; identical to SEQ ID NO: 27744
  Synthetic polypeptide

SEQ ID NO: 27746 - protein, 51 aa, Artificial Sequence
  Synthetic polypeptide
EVRRPSAWQPPRLRSEEPLRPAAAPSENPPAYAQEDWEWNGHQQKHHSYSC

SEQ ID NO: 27747 - protein, 51 aa, Artificial Sequence; identical to SEQ ID NO: 27746
  Synthetic polypeptide

SEQ ID NO: 27748 - protein, 38 aa, Artificial Sequence
  Synthetic polypeptide
EVRSPSARQLPRLRILLHMPKRIGSGMDTSRSTTVIPV

SEQ ID NO: 27749 - protein, 38 aa, Artificial Sequence; identical to SEQ ID NO: 27748
  Synthetic polypeptide

SEQ ID NO: 27750 - protein, 24 aa, Artificial Sequence
  Synthetic polypeptide
ESSCICPRGLGVEWTPAEAPQLFL

SEQ ID NO: 27751 - protein, 24 aa, Artificial Sequence
  Synthetic polypeptide
ESSCICPRGLGVEWTPAEAPQLFL

SEQ ID NO: 27752 - protein, 35 aa, Artificial Sequence
  Synthetic polypeptide
GASPPSSHPIWESSCICPRGLGVEWTPAEAPQLFL

SEQ ID NO: 27753 - protein, 35 aa, Artificial Sequence; identical to SEQ ID NO: 27752
  Synthetic polypeptide

SEQ ID NO: 27754 - protein, 51 aa, Artificial Sequence
  Synthetic polypeptide
EVRSPSARQLPRLRSEEPLRPAATPSGNPPAYAQEDWEWNGHQQKHHSYSC

SEQ ID NO: 27755 - protein, 51 aa, Artificial Sequence; identical to SEQ ID NO: 27754
  Synthetic polypeptide

SEQ ID NO: 27756 - protein, 38 aa, Artificial Sequence
  Synthetic polypeptide
EVRSLSAQQPPHLGILLHMPKRIGSGMDTSRSTTVIPV

SEQ ID NO: 27757 - protein, 38 aa, Artificial Sequence; identical to SEQ ID NO: 27756
  Synthetic polypeptide

SEQ ID NO: 27758 - protein, 47 aa, Artificial Sequence
  Synthetic polypeptide
ALRDQFTMNPRLLLSLVTYLLSCFSSGNDRYLSLGPMESKFLCGGFP

SEQ ID NO: 27759 - protein, 443 aa, Artificial Sequence
  Synthetic polypeptide
ILGFCCPLLPIFSAVSVPGMTDTSVLDQWKASFFVEDFLEKKTITRMVTQINCEFEEVVPSSNPDSQIEVEEVSLYTHMDYNEVFTPVSCLEKCSALQNQNQDLFIDDKGILFVSSRKHLPTLPTLLSRLKLFLVKDPLLDFKGQIFTEANFSRECFSLQETLEAFVKEDFCMDKVNFCQEKLEDTICLNEPSSFLIEYEFLIPPSLKPEIDIPSLSELKELLNPVPEIINYVDEKEKLFERDLTNKHGIEDIGDIKFSSTEILTIQSQSEPEECSKPGELEMPLTPLFLTCQHSSVNSLRTELQTFPLSPVCKINLLTAEESANEYYMMWQLERCRSPLNPFLLTVPRIQEPHSQYSVTDLKKIFSVKEESLVINLEKAEWWKQAGLNLKMMETLEHLNTYLCHDNLSSNDTKIEIFLPTKVLQLECKYITVNISYVNIFRM

SEQ ID NO: 27760 - protein, 17 aa, Artificial Sequence
  Synthetic polypeptide
ASVVPCYLSSQLFQFRE

SEQ ID NO: 27761 - protein, 5 aa, Artificial Sequence
  Synthetic polypeptide
VPECG

SEQ ID NO: 27762 - protein, 491 aa, Artificial Sequence
  Synthetic polypeptide
EIIQKKYSRQSLIHSKFQNVVRKKFYRDALLLRIPSCLYQDESYHVAVTDNKFRRPWTRVSAVSVPGMTDTSVLDQWKASFFVEDFLEKKTITRMVTQINCEFEEVVPSSNPDSQIEVEEVSLYTHMDYNEVFTPVSCLEKCSALQNQNQDLFIDDKGILFVSSRKHLPTLPTLLSRLKLFLVKDPLLDFKGQIFTEANFSRECFSLQETLEAFVKEDFCMDKVNFCQEKLEDTICLNEPSSFLIEYEFLIPPSLKPEIDIPSLSELKELLNPVPEIINYVDEKEKLFERDLTNKHGIEDIGDIKFSSTEILTIQSQSEPEECSKPGELEMPLTPLFLTCQHSSVNSLRTELQTFPLSPVCKINLLTAEESANEYYMMWQLERCRSPLNPFLLTVPRIQEPHSQYSVTDLKKIFSVKEESLVINLEKAEWWKQAGLNLKMMETLEHLNTYLCHDNLSSNDTKIEIFLPTKVLQLECKYITVNISYVNIFRM

SEQ ID NO: 27763 - protein, 33 aa, Artificial Sequence
  Synthetic polypeptide
FIVSSRMWLERSFTEMLYCFESLHVYIKMKVTM

SEQ ID NO: 27764 - protein, 79 aa, Artificial Sequence
  Synthetic polypeptide
AIVWELGTFPGARYHTCATEGKLQYLSDLWEVVQPGHRFHLPLAEEDHGQDDSEHAGAGRGRYRGGDQHDQHSLAERCL

SEQ ID NO: 27765 - protein, 79 aa, Artificial Sequence; identical to SEQ ID NO: 27764
  Synthetic polypeptide

SEQ ID NO: 27766 - protein, 352 aa, Artificial Sequence
  Synthetic polypeptide
NGSDSTDYELNEPLFGNLARFPAHGIIHALQRENFNISRIYGKWYNLAIGSTCPWLKKIMDRMTVSTLVLGEGATEAEISMTSTRWRKGVCEETSGAYEKTDTDGKFLYHKSKWNITMESYVVHTNYDEYAIFLTKKFSRHHGPTITAKLYGRAPQLRETLLQDFRVVAQGVGIPEDSIFTMADRGECVPGEQEPEPILIPRVRRAVLPQEEEGSGGGQLVTEVTKKEDSCQLGYSAGPCMGMTSRYFYNGTSMACETFQYGGCMGNGNNFVTEKECLQTCRTVAACNLPIVRGPCRAFIQLWAFDAVKGKCVLFPYGGCQGNGNKFYSEKECREYCGVPGDGDEELLRFSN

SEQ ID NO: 27767 - protein, 45 aa, Artificial Sequence
  Synthetic polypeptide
MSHCLGTWHVSRRTVSYMRYRGKTSISLGSMGSGTTWPSVPPAPG

SEQ ID NO: 27768 - protein, 45 aa, Artificial Sequence; identical to SEQ ID NO: 27767
  Synthetic polypeptide

SEQ ID NO: 27769 - protein, 238 aa, Artificial Sequence
  Synthetic polypeptide
NGSDSTDYELNEPLFGNLARFPAHGIIHALQRENFNISRIYGKWYNLAIGSTCPWLKKIMDRMTVSTLVLGEGATEAEISMTSTRWRKGVCEETSGAYEKTDTDGKFLYHKSKWNITMESYVVHTNYDEYAIFLTKKFSRHHGPTITAKLYGRAPQLRETLLQDFRVVAQGVGIPEDSIFTMADRVNGLEQATQAGPFMKWTKARQVPSTMLTKDTNPGLGWPLGLVLLFTPLSCSVT

SEQ ID NO: 27770 - protein, 64 aa, Artificial Sequence
  Synthetic polypeptide
WFSPTSQVLFLTRSHCLKVCSTSPFALSLLLSCEEGTCFLFAFHHDYHWQVVLYRIGLSKRGVQ

SEQ ID NO: 27771 - protein, 64 aa, Artificial Sequence; identical to SEQ ID NO: 27770
  Synthetic polypeptide

SEQ ID NO: 27772 - protein, 192 aa, Artificial Sequence
  Synthetic polypeptide
KCVAPPPSLCLSCCLVKKGLASSLPSTMIITGKWFYIASAFRNEEYNKSVQEIQATFFYFTPNKTEDTIFLREYQTRQNQCFYNSSYLNVQRENGTVSRYEGGREHVAHLLFLRDTKTLMFGSYLDDEKNWGLSFYADKPETTKEQLGEFYEALDCLCIPRSDVMYTDWKKDKCEPLEKQHEKERKQEEGES

SEQ ID NO: 27773 - protein, 47 aa, Artificial Sequence
  Synthetic polypeptide
KCVAPPPSLCLSCCLVKKGLASSLPSTMIITGKWFYIASAFRNEEYN

SEQ ID NO: 27774 - protein, 36 aa, Artificial Sequence
  Synthetic polypeptide
GLPAMLPLKPAELQRTRSFSESTRPARTSASITPVT

SEQ ID NO: 27775 - protein, 23 aa, Artificial Sequence
  Synthetic polypeptide
SLRNYRGHDLSQRVPDPPEPVLL

SEQ ID NO: 27776 - protein, 174 aa, Artificial Sequence
  Synthetic polypeptide
KCVAPPPSLCLSCCLVKKGLASSLPSTMIVSFLRPPSHASSEACGTTEDTIFLREYQTRQNQCFYNSSYLNVQRENGTVSRYEGGREHVAHLLFLRDTKTLMFGSYLDDEKNWGLSFYADKPETTKEQLGEFYEALDCLCIPRSDVMYTDWKKDKCEPLEKQHEKERKQEEGES

SEQ ID NO: 27777 - protein, 173 aa, Artificial Sequence
  Synthetic polypeptide
KECGLWSQTNITGKWFYIASAFRNEEYNKSVQEIQATFFYFTPNKTEDTIFLREYQTRQNQCFYNSSYLNVQRENGTVSRYEGGREHVAHLLFLRDTKTLMFGSYLDDEKNWGLSFYADKPETTKEQLGEFYEALDCLCIPRSDVMYTDWKKDKCEPLEKQHEKERKQEEGES

SEQ ID NO: 27778 - protein, 68 aa, Artificial Sequence
  Synthetic polypeptide
KNVDFGVKLISLASGFISHRPFETRSTISRFRRSKQPSFTLPPTRQRTRSFSESTRPARTSASITPVT

SEQ ID NO: 27779 - protein, 28 aa, Artificial Sequence
  Synthetic polypeptide
KECGLWSQTNITGKWFYIASAFRNEEYN

SEQ ID NO: 27780 - protein, 28 aa, Artificial Sequence
  Synthetic polypeptide
KNVDFGVKLISLASGFISHRPFETRSTI

SEQ ID NO: 27781 - protein, 13 aa, Artificial Sequence
  Synthetic polypeptide
LGGSPTAGRFSRV

SEQ ID NO: 27782 - protein, 13 aa, Artificial Sequence
  Synthetic polypeptide
LGGSPTAGRFSRV

SEQ ID NO: 27783 - protein, 13 aa, Artificial Sequence
  Synthetic polypeptide
LGGSPTAGRFSRV

SEQ ID NO: 27784 - protein, 858 aa, Artificial Sequence
  Synthetic polypeptide
MEDLPQLGDLAVSEVGWDGLRLNWTAADNAYEHFVIQVQEVNKVEAAQNLTLPGSLRAVDIPGLEAATPYRVSIYGVIRGYRTPVLSAEASTAKEPEIGNLNVSDITPESFNLSWMATDGIFETFTIEIIDSNRLLETVEYNISGAERTAHISGLPPSTDFIVYLSGLAPSIRTKTISATATTEALPLLENLTISDINPYGFTVSWMASENAFDSFLVTVVDSGKLLDPQEFTLSGTQRKLELRGLITGIGYEVMVSGFTQGHQTKPLRAEIVTEAEPEVDNLLVSDATPDGFRLSWTADEGVFDNFVLKIRDTKKQSEPLEITLLAPERTRDITGLREATEYEIELYGISKGRRSQTVSAIATTAMGSPKEVIFSDITENSATVSWRAPTAQVESFRITYVPITGGTPSMVTVDGTKTQTRLVKLIPGVEYLVSIIAMKGFEESEPVSGSFTTALDGPSGLVTANITDSEALARWQPAIATVDSYVISYTGEKVPEITRTVSGNTVEYALTDLEPATEYTLRIFAEKGPQKSSTITAKFTTDLDSPRDLTATEVQSETALLTWRPPRASVTGYLLVYESVDGTVKEVIVGPDTTSYSLADLSPSTHYTAKIQALNGPLRSNMIQTIFTTIGLLYPFPKDCSQAMLNGDTTSGLYTIYLNGDKAEALEVFCDMTSDGGGWIVFLRRKNGRENFYQNWKAYAAGFGDRREEFWLGLDNLNKITAQGQYELRVDLRDHGETAFAVYDKFSVGDAKTRYKLKVEGYSGTAGDSMAYHNGRSFSTFDKDTDSAITNCALSYKGAFWYRNCHRVNLMGRYGDNNHSQGVNWFHWKGHEHSIQFAEMKLRPSNFRNLEGRRKRA

SEQ ID NO: 27785 - protein, 9 aa, Artificial Sequence
  Synthetic polypeptide
WRISHSWEI

SEQ ID NO: 27786 - protein, 9 aa, Artificial Sequence
  Synthetic polypeptide
WRISHSWEI

SEQ ID NO: 27787 - protein, 9 aa, Artificial Sequence
  Synthetic polypeptide
WRISHSWEI

SEQ ID NO: 27788 - protein, 767 aa, Artificial Sequence
  Synthetic polypeptide
MEDLPQLGDLAVSEVGWDGLRLNWTAADNAYEHFVIQVQEVNKVEAAQNLTLPGSLRAVDIPGLEAATPYRVSIYGVIRGYRTPVLSAEASTAKEPEIGNLNVSDITPESFNLSWMATDGIFETFTIEIIDSNRLLETVEYNISGAERTAHISGLPPSTDFIVYLSGLAPSIRTKTISATATTEAEPEVDNLLVSDATPDGFRLSWTADEGVFDNFVLKIRDTKKQSEPLEITLLAPERTRDITGLREATEYEIELYGISKGRRSQTVSAIATTAMGSPKEVIFSDITENSATVSWRAPTAQVESFRITYVPITGGTPSMVTVDGTKTQTRLVKLIPGVEYLVSIIAMKGFEESEPVSGSFTTALDGPSGLVTANITDSEALARWQPAIATVDSYVISYTGEKVPEITRTVSGNTVEYALTDLEPATEYTLRIFAEKGPQKSSTITAKFTTDLDSPRDLTATEVQSETALLTWRPPRASVTGYLLVYESVDGTVKEVIVGPDTTSYSLADLSPSTHYTAKIQALNGPLRSNMIQTIFTTIGLLYPFPKDCSQAMLNGDTTSGLYTIYLNGDKAEALEVFCDMTSDGGGWIVFLRRKNGRENFYQNWKAYAAGFGDRREEFWLGLDNLNKITAQGQYELRVDLRDHGETAFAVYDKFSVGDAKTRYKLKVEGYSGTAGDSMAYHNGRSFSTFDKDTDSAITNCALSYKGAFWYRNCHRVNLMGRYGDNNHSQGVNWFHWKGHEHSIQFAEMKLRPSNFRNLEGRRKRA

SEQ ID NO: 27789 - protein, 585 aa, Artificial Sequence
  Synthetic polypeptide
MEDLPQLGDLAVSEVGWDGLRLNWTAADNAYEHFVIQVQEVNKVEAAQNLTLPGSLRAVDIPGLEAATPYRVSIYGVIRGYRTPVLSAEASTAMGSPKEVIFSDITENSATVSWRAPTAQVESFRITYVPITGGTPSMVTVDGTKTQTRLVKLIPGVEYLVSIIAMKGFEESEPVSGSFTTALDGPSGLVTANITDSEALARWQPAIATVDSYVISYTGEKVPEITRTVSGNTVEYALTDLEPATEYTLRIFAEKGPQKSSTITAKFTTDLDSPRDLTATEVQSETALLTWRPPRASVTGYLLVYESVDGTVKEVIVGPDTTSYSLADLSPSTHYTAKIQALNGPLRSNMIQTIFTTIGLLYPFPKDCSQAMLNGDTTSGLYTIYLNGDKAEALEVFCDMTSDGGGWIVFLRRKNGRENFYQNWKAYAAGFGDRREEFWLGLDNLNKITAQGQYELRVDLRDHGETAFAVYDKFSVGDAKTRYKLKVEGYSGTAGDSMAYHNGRSFSTFDKDTDSAITNCALSYKGAFWYRNCHRVNLMGRYGDNNHSQGVNWFHWKGHEHSIQFAEMKLRPSNFRNLEGRRKRA

SEQ ID NO: 27790 - protein, 32 aa, Artificial Sequence
  Synthetic polypeptide
EVRRPSAWQPPRLRSEEPLRPAAAPSENALRS

SEQ ID NO: 27791 - protein, 32 aa, Artificial Sequence; identical to SEQ ID NO: 27790
  Synthetic polypeptide

SEQ ID NO: 27792 - protein, 32 aa, Artificial Sequence; identical to SEQ ID NO: 27790
  Synthetic polypeptide

SEQ ID NO: 27793 - protein, 32 aa, Artificial Sequence; identical to SEQ ID NO: 27790
  Synthetic polypeptide

SEQ ID NO: 27794 - protein, 16 aa, Artificial Sequence
  Synthetic polypeptide
EVRSPSARQPPRLRMP

SEQ ID NO: 27795 - protein, 16 aa, Artificial Sequence
  Synthetic polypeptide
EVRSPSARQPPRLRMP

SEQ ID NO: 27796 - protein, 16 aa, Artificial Sequence
  Synthetic polypeptide
EVRSPSARQPPRLRMP

SEQ ID NO: 27797 - protein, 16 aa, Artificial Sequence
  Synthetic polypeptide
EVRSPSARQPPRLRMP

SEQ ID NO: 27798 - protein, 660 aa, Artificial Sequence
  Synthetic polypeptide
ECPEELKPMKDGSGCYDHSKGIDCSDGFNGGCEQLCLQQTLPLPYDATSSTIFMFCGCVEEYKLAPDGKSCLMLSDVCEGPKCLKPDSKFNDTLFGEMLHGYNNRTQHVNQGQVFQMTFRENNFIKDFPQLADGLLVIPLPVEEQCRGVLSEPLPDLQLLTGDIRYDEAMGYPMVQQWRVRSNLYRVKLSTITLAAGFTNVLKILTKESSREELLSFIQHYGSHYIAEALYGSELTCIIHFPSKKVQQQLWLQYQKETTELGSKKELKSMPFITYLSGLLTAQMLSDDQLISGVEIRCEEKGRCPSTCHLCRRPGKEQLSPTPVLLEINRVVPLYTLIQDNGTKEAFKSALMSSYWCSGKGDVIDDWCRCDLSAFDANGLPNCSPLLQPVLRLSPTVEPSSTVVSLEWVDVQPAIGTKVSDYILQHKKVDEYTDTDLYTGEFLSFADDLLSGLGTSCVAAGRSHGEVPEVSIYSVIFKCLEPDGLYKFTLYAVDTRGRHSELSTVTLRTACPLVDDNKAEEIADKIYNLYNGYTSGKEQQMAYNTLMEVSASMLFRVQHHYNSHYEKFGDFVWRSEDELGPRKAHLILRRLERVSSHCSSLLRSAYIQSRVETVPYLFCRSEEVRPAGMVWYSILKDTKITCEEKMVSMARNTYGESKGR

SEQ ID NO: 27799 - protein, 660 aa, Artificial Sequence; identical to SEQ ID NO: 27798
  Synthetic polypeptide

SEQ ID NO: 27800 - protein, 660 aa, Artificial Sequence; identical to SEQ ID NO: 27798
  Synthetic polypeptide

SEQ ID NO: 27801 - protein, 660 aa, Artificial Sequence; identical to SEQ ID NO: 27798
  Synthetic polypeptide

SEQ ID NO: 27802 - protein, 660 aa, Artificial Sequence; identical to SEQ ID NO: 27798
  Synthetic polypeptide

SEQ ID NO: 27803 - protein, 660 aa, Artificial Sequence; identical to SEQ ID NO: 27798
  Synthetic polypeptide

SEQ ID NO: 27804 - protein, 660 aa, Artificial Sequence; identical to SEQ ID NO: 27798
  Synthetic polypeptide

SEQ ID NO: 27805 - protein, 660 aa, Artificial Sequence; identical to SEQ ID NO: 27798
  Synthetic polypeptide

SEQ ID NO: 27806 - protein, 16 aa, Artificial Sequence
  Synthetic polypeptide
EVRRPSAWQPPRLRMP

SEQ ID NO: 27807 - protein, 16 aa, Artificial Sequence
  Synthetic polypeptide
EVRRPSAWQPPRLRMP

SEQ ID NO: 27808 - protein, 16 aa, Artificial Sequence
  Synthetic polypeptide
EVRRPSAWQPPRLRMP

SEQ ID NO: 27809 - protein, 16 aa, Artificial Sequence
  Synthetic polypeptide
EVRRPSAWQPPRLRMP

SEQ ID NO: 27810 - protein, 54 aa, Artificial Sequence
  Synthetic polypeptide
GASLPCRPSSEMWGAPLPCRPVRDVRSVSARTPRLRSEETLCLATAPSENALRS

SEQ ID NO: 27811 - protein, 54 aa, Artificial Sequence; identical to SEQ ID NO: 27810
  Synthetic polypeptide

SEQ ID NO: 27812 - protein, 54 aa, Artificial Sequence; identical to SEQ ID NO: 27810
  Synthetic polypeptide

SEQ ID NO: 27813 - protein, 54 aa, Artificial Sequence; identical to SEQ ID NO: 27810
  Synthetic polypeptide

SEQ ID NO: 27814 - protein, 660 aa, Artificial Sequence; identical to SEQ ID NO: 27798
  Synthetic polypeptide

SEQ ID NO: 27815 - protein, 660 aa, Artificial Sequence; identical to SEQ ID NO: 27798
  Synthetic polypeptide

SEQ ID NO: 27816 - protein, 660 aa, Artificial Sequence; identical to SEQ ID NO: 27798
  Synthetic polypeptide

SEQ ID NO: 27817 - protein, 660 aa, Artificial Sequence; identical to SEQ ID NO: 27798
  Synthetic polypeptide

SEQ ID NO: 27818 - protein, 30 aa, Artificial Sequence
  Synthetic polypeptide
DVGSTSALPPRPGCEERLCPDAPSENALRS

SEQ ID NO: 27819 - protein, 30 aa, Artificial Sequence; identical to SEQ ID NO: 27818
  Synthetic polypeptide

SEQ ID NO: 27820 - protein, 30 aa, Artificial Sequence; identical to SEQ ID NO: 27818
  Synthetic polypeptide

SEQ ID NO: 27821 - protein, 30 aa, Artificial Sequence; identical to SEQ ID NO: 27818
  Synthetic polypeptide

SEQ ID NO: 27822 - protein, 38 aa, Artificial Sequence
  Synthetic polypeptide
GASLPCRPSSEMWGAPLPCRPVRDVRSVSARTPRLRMP

SEQ ID NO: 27823 - protein, 38 aa, Artificial Sequence; identical to SEQ ID NO: 27822
  Synthetic polypeptide

SEQ ID NO: 27824 - protein, 38 aa, Artificial Sequence; identical to SEQ ID NO: 27822
  Synthetic polypeptide

SEQ ID NO: 27825 - protein, 38 aa, Artificial Sequence; identical to SEQ ID NO: 27822
  Synthetic polypeptide

SEQ ID NO: 27826 - protein, 34 aa, Artificial Sequence
  Synthetic polypeptide
YNWILRLVSESSWGEDGQECSRDWRNEGRGHQTT

SEQ ID NO: 27827 - protein, 34 aa, Artificial Sequence; identical to SEQ ID NO: 27826
  Synthetic polypeptide

SEQ ID NO: 27828 - protein, 34 aa, Artificial Sequence; identical to SEQ ID NO: 27826
  Synthetic polypeptide

SEQ ID NO: 27829 - protein, 34 aa, Artificial Sequence; identical to SEQ ID NO: 27826
  Synthetic polypeptide

SEQ ID NO: 27830 - protein, 34 aa, Artificial Sequence; identical to SEQ ID NO: 27826
  Synthetic polypeptide

SEQ ID NO: 27831 - protein, 34 aa, Artificial Sequence; identical to SEQ ID NO: 27826
  Synthetic polypeptide

SEQ ID NO: 27832 - protein, 93 aa, Artificial Sequence
  Synthetic polypeptide
GWFQNHLGEKMGRNVVEIGEMKAEVTKLHKKLFEQEKKLQNTMKLLQLSKRQEKVIFDQLVVTHKILRKARGNLELRPGGAHPGTCSPSRPGS

SEQ ID NO: 27833 - protein, 93 aa, Artificial Sequence; identical to SEQ ID NO: 27832
  Synthetic polypeptide

SEQ ID NO: 27834 - protein, 93 aa, Artificial Sequence; identical to SEQ ID NO: 27832
  Synthetic polypeptide

SEQ ID NO: 27835 - protein, 93 aa, Artificial Sequence; identical to SEQ ID NO: 27832
  Synthetic polypeptide

SEQ ID NO: 27836 - protein, 93 aa, Artificial Sequence; identical to SEQ ID NO: 27832
  Synthetic polypeptide

SEQ ID NO: 27837 - protein, 93 aa, Artificial Sequence; identical to SEQ ID NO: 27832
  Synthetic polypeptide

SEQ ID NO: 27838 - protein, 61 aa, Artificial Sequence
  Synthetic polypeptide
IWGLLPSGWLISFQRLLHSLGMTRTPSPATVAVRQLALRVCPAWSLATTCGPARMAAMSWA

SEQ ID NO: 27839 - protein, 61 aa, Artificial Sequence; identical to SEQ ID NO: 27838
  Synthetic polypeptide

SEQ ID NO: 27840 - protein, 61 aa, Artificial Sequence; identical to SEQ ID NO: 27838
  Synthetic polypeptide

SEQ ID NO: 27841 - protein, 61 aa, Artificial Sequence; identical to SEQ ID NO: 27838
  Synthetic polypeptide

SEQ ID NO: 27842 - protein, 61 aa, Artificial Sequence; identical to SEQ ID NO: 27838
  Synthetic polypeptide

SEQ ID NO: 27843 - protein, 61 aa, Artificial Sequence; identical to SEQ ID NO: 27838
  Synthetic polypeptide

SEQ ID NO: 27844 - protein, 229 aa, Artificial Sequence
  Synthetic polypeptide
VILVNLGSSAEWVVDKFSETPPLSGNDTDSLSCDSGSSATSTPCVSRLVTGHHLWASKNGRHVLGLIEDYEALLKQISQGQRLLAEMDIQTQEAPSSTSQELGTKGPHPAPLSKFVSSVSTAKLTLEEAYRRLKLLWRVSLPEDGQCPLHCEQIGEMKAEVTKLHKKLFEQEKKLQNTMKLLQLSKRQEKVIFDQLVVTHKILRKARGNLELRPGGAHPGTCSPSRPGS

SEQ ID NO: 27845 - protein, 229 aa, Artificial Sequence; identical to SEQ ID NO: 27844
  Synthetic polypeptide

SEQ ID NO: 27846 - protein, 229 aa, Artificial Sequence; identical to SEQ ID NO: 27844
  Synthetic polypeptide

SEQ ID NO: 27847 - protein, 229 aa, Artificial Sequence; identical to SEQ ID NO: 27844
  Synthetic polypeptide

SEQ ID NO: 27848 - protein, 229 aa, Artificial Sequence; identical to SEQ ID NO: 27844
  Synthetic polypeptide

SEQ ID NO: 27849 - protein, 229 aa, Artificial Sequence; identical to SEQ ID NO: 27844
  Synthetic polypeptide

SEQ ID NO: 27850 - protein, 17 aa, Artificial Sequence
  Synthetic polypeptide
IWGLLPSGFRDSSTLWE

SEQ ID NO: 27851 - protein, 17 aa, Artificial Sequence
  Synthetic polypeptide
IWGLLPSGFRDSSTLWE

SEQ ID NO: 27852 - protein, 17 aa, Artificial Sequence
  Synthetic polypeptide
IWGLLPSGFRDSSTLWE

SEQ ID NO: 27853 - protein, 17 aa, Artificial Sequence
  Synthetic polypeptide
IWGLLPSGFRDSSTLWE

SEQ ID NO: 27854 - protein, 17 aa, Artificial Sequence
  Synthetic polypeptide
IWGLLPSGFRDSSTLWE

SEQ ID NO: 27855 - protein, 17 aa, Artificial Sequence
  Synthetic polypeptide
IWGLLPSGFRDSSTLWE

SEQ ID NO: 27856 - protein, 302 aa, Artificial Sequence
  Synthetic polypeptide
MPLLLSLVRMTHHSCNSCYLLNPVQMLLLLRSLPCSLPPCTDNCFFWLWPFITLLLHLLQCLCSDQTVGYWNAGTSLSHPCESGVFCRVVSETPPLSGNDTDSLSCDSGSSATSTPCVSRLVTGHHLWASKNGRHVLGLIEDYEALLKQISQGQRLLAEMDIQTQEAPSSTSQELGTKGPHPAPLSKFVSSVSTAKLTLEEAYRRLKLLWRVSLPEDGQCPLHCEQIGEMKAEVTKLHKKLFEQEKKLQNTMKLLQLSKRQEKVIFDQLVVTHKILRKARGNLELRPGGAHPGTCSPSRPGS

SEQ ID NO: 27857 - protein, 302 aa, Artificial Sequence; identical to SEQ ID NO: 27856
  Synthetic polypeptide

SEQ ID NO: 27858 - protein, 302 aa, Artificial Sequence; identical to SEQ ID NO: 27856
  Synthetic polypeptide

SEQ ID NO: 27859 - protein, 302 aa, Artificial Sequence; identical to SEQ ID NO: 27856
  Synthetic polypeptide

SEQ ID NO: 27860 - protein, 302 aa, Artificial Sequence; identical to SEQ ID NO: 27856
  Synthetic polypeptide

SEQ ID NO: 27861 - protein, 302 aa, Artificial Sequence; identical to SEQ ID NO: 27856
  Synthetic polypeptide

SEQ ID NO: 27862 - protein, 61 aa, Artificial Sequence
  Synthetic polypeptide
VILVNLGSSAEWFQRLLHSLGMTRTPSPATVAVRQLALRVCPAWSLATTCGPARMAAMSWA

SEQ ID NO: 27863 - protein, 61 aa, Artificial Sequence; identical to SEQ ID NO: 27862
  Synthetic polypeptide

SEQ ID NO: 27864 - protein, 61 aa, Artificial Sequence; identical to SEQ ID NO: 27862
  Synthetic polypeptide

SEQ ID NO: 27865 - protein, 61 aa, Artificial Sequence; identical to SEQ ID NO: 27862
  Synthetic polypeptide

SEQ ID NO: 27866 - protein, 61 aa, Artificial Sequence; identical to SEQ ID NO: 27862
  Synthetic polypeptide

SEQ ID NO: 27867 - protein, 61 aa, Artificial Sequence; identical to SEQ ID NO: 27862
  Synthetic polypeptide

SEQ ID NO: 27868 - protein, 219 aa, Artificial Sequence
  Synthetic polypeptide
IWGLLPISETPPLSGNDTDSLSCDSGSSATSTPCVSRLVTGHHLWASKNGRHVLGLIEDYEALLKQISQGQRLLAEMDIQTQEAPSSTSQELGTKGPHPAPLSKFVSSVSTAKLTLEEAYRRLKLLWRVSLPEDGQCPLHCEQIGEMKAEVTKLHKKLFEQEKKLQNTMKLLQLSKRQEKVIFDQLVVTHKILRKARGNLELRPGGAHPGTCSPSRPGS

SEQ ID NO: 27869 - protein, 219 aa, Artificial Sequence; identical to SEQ ID NO: 27868
  Synthetic polypeptide

SEQ ID NO: 27870 - protein, 219 aa, Artificial Sequence; identical to SEQ ID NO: 27868
  Synthetic polypeptide

SEQ ID NO: 27871 - protein, 219 aa, Artificial Sequence; identical to SEQ ID NO: 27868
  Synthetic polypeptide

SEQ ID NO: 27872 - protein, 219 aa, Artificial Sequence; identical to SEQ ID NO: 27868
  Synthetic polypeptide

SEQ ID NO: 27873 - protein, 219 aa, Artificial Sequence; identical to SEQ ID NO: 27868
  Synthetic polypeptide

SEQ ID NO: 27874 - protein, 137 aa, Artificial Sequence
  Synthetic polypeptide
MPLLLSLVRMTHHSCNSCYLLNPVQMLLLLRSLPCSLPPCTDNCFFWLWPFITLLLHLLQCLCSDQTVGYWNAGTSLSHPCESGVFCRFQRLLHSLGMTRTPSPATVAVRQLALRVCPAWSLATTCGPARMAAMSWA

SEQ ID NO: 27875 - protein, 137 aa, Artificial Sequence; identical to SEQ ID NO: 27874
  Synthetic polypeptide

SEQ ID NO: 27876 - protein, 137 aa, Artificial Sequence; identical to SEQ ID NO: 27874
  Synthetic polypeptide

SEQ ID NO: 27877 - protein, 137 aa, Artificial Sequence; identical to SEQ ID NO: 27874
  Synthetic polypeptide

SEQ ID NO: 27878 - protein, 137 aa, Artificial Sequence; identical to SEQ ID NO: 27874
  Synthetic polypeptide

SEQ ID NO: 27879 - protein, 137 aa, Artificial Sequence; identical to SEQ ID NO: 27874
  Synthetic polypeptide

SEQ ID NO: 27880 - protein, 20 aa, Artificial Sequence
  Synthetic polypeptide
VILVNLGSSADFRDSSTLWE

SEQ ID NO: 27881 - protein, 20 aa, Artificial Sequence
  Synthetic polypeptide
VILVNLGSSADFRDSSTLWE

SEQ ID NO: 27882 - protein, 20 aa, Artificial Sequence
  Synthetic polypeptide
VILVNLGSSADFRDSSTLWE

SEQ ID NO: 27883 - protein, 20 aa, Artificial Sequence
  Synthetic polypeptide
VILVNLGSSADFRDSSTLWE

SEQ ID NO: 27884 - protein, 20 aa, Artificial Sequence
  Synthetic polypeptide
VILVNLGSSADFRDSSTLWE

SEQ ID NO: 27885 - protein, 20 aa, Artificial Sequence
  Synthetic polypeptide
VILVNLGSSADFRDSSTLWE

SEQ ID NO: 27886 - protein, 25 aa, Artificial Sequence
  Synthetic polypeptide
SDCGLLECRHQLESSFFRDSSTLWE

SEQ ID NO: 27887 - protein, 25 aa, Artificial Sequence
  Synthetic polypeptide
SDCGLLECRHQLESSFFRDSSTLWE

SEQ ID NO: 27888 - protein, 25 aa, Artificial Sequence
  Synthetic polypeptide
SDCGLLECRHQLESSFFRDSSTLWE

SEQ ID NO: 27889 - protein, 25 aa, Artificial Sequence
  Synthetic polypeptide
SDCGLLECRHQLESSFFRDSSTLWE

SEQ ID NO: 27890 - protein, 25 aa, Artificial Sequence
  Synthetic polypeptide
SDCGLLECRHQLESSFFRDSSTLWE

SEQ ID NO: 27891 - protein, 25 aa, Artificial Sequence
  Synthetic polypeptide
SDCGLLECRHQLESSFFRDSSTLWE

SEQ ID NO: 27892 - protein, 293 aa, Artificial Sequence
  Synthetic polypeptide
MPLLLSLVRMTHHSCNSCYLLNPVQMLLLLRSLPCSLPPCTDNCFFWLWPFITLLLHLLQCLCSDQTVGYWNAGTSLSHPFSETPPLSGNDTDSLSCDSGSSATSTPCVSRLVTGHHLWASKNGRHVLGLIEDYEALLKQISQGQRLLAEMDIQTQEAPSSTSQELGTKGPHPAPLSKFVSSVSTAKLTLEEAYRRLKLLWRVSLPEDGQCPLHCEQIGEMKAEVTKLHKKLFEQEKKLQNTMKLLQLSKRQEKVIFDQLVVTHKILRKARGNLELRPGGAHPGTCSPSRPGS

SEQ ID NO: 27893 - protein, 293 aa, Artificial Sequence; identical to SEQ ID NO: 27892
  Synthetic polypeptide

SEQ ID NO: 27894 - protein, 293 aa, Artificial Sequence; identical to SEQ ID NO: 27892
  Synthetic polypeptide

SEQ ID NO: 27895 - protein, 293 aa, Artificial Sequence; identical to SEQ ID NO: 27892
  Synthetic polypeptide

SEQ ID NO: 27896 - protein, 293 aa, Artificial Sequence; identical to SEQ ID NO: 27892
  Synthetic polypeptide

SEQ ID NO: 27897 - protein, 293 aa, Artificial Sequence; identical to SEQ ID NO: 27892
  Synthetic polypeptide

SEQ ID NO: 27898 - protein, 52 aa, Artificial Sequence
  Synthetic polypeptide
VILFQRLLHSLGMTRTPSPATVAVRQLALRVCPAWSLATTCGPARMAAMSWA

SEQ ID NO: 27899 - protein, 52 aa, Artificial Sequence; identical to SEQ ID NO: 27898
  Synthetic polypeptide

SEQ ID NO: 27900 - protein, 52 aa, Artificial Sequence; identical to SEQ ID NO: 27898
  Synthetic polypeptide

SEQ ID NO: 27901 - protein, 52 aa, Artificial Sequence; identical to SEQ ID NO: 27898
  Synthetic polypeptide

SEQ ID NO: 27902 - protein, 52 aa, Artificial Sequence; identical to SEQ ID NO: 27898
  Synthetic polypeptide

SEQ ID NO: 27903 - protein, 52 aa, Artificial Sequence; identical to SEQ ID NO: 27898
  Synthetic polypeptide

SEQ ID NO: 27904 - protein, 27 aa, Artificial Sequence
  Synthetic polypeptide
LFFLALALHHSAVAPSAVFRDSSTLWE

SEQ ID NO: 27905 - protein, 27 aa, Artificial Sequence
  Synthetic polypeptide
LFFLALALHHSAVAPSAVFRDSSTLWE

SEQ ID NO: 27906 - protein, 27 aa, Artificial Sequence
  Synthetic polypeptide
LFFLALALHHSAVAPSAVFRDSSTLWE

SEQ ID NO: 27907 - protein, 27 aa, Artificial Sequence
  Synthetic polypeptide
LFFLALALHHSAVAPSAVFRDSSTLWE

SEQ ID NO: 27908 - protein, 27 aa, Artificial Sequence
  Synthetic polypeptide
LFFLALALHHSAVAPSAVFRDSSTLWE

SEQ ID NO: 27909 - protein, 27 aa, Artificial Sequence
  Synthetic polypeptide
LFFLALALHHSAVAPSAVFRDSSTLWE

SEQ ID NO: 27910 - protein, 273 aa, Artificial Sequence
  Synthetic polypeptide
MPLLLSLVRMTHHSCNSCYLLNPVQMLLLLRSLPCSLPPCTDNCFFWLWPFITLLLHLLQFSETPPLSGNDTDSLSCDSGSSATSTPCVSRLVTGHHLWASKNGRHVLGLIEDYEALLKQISQGQRLLAEMDIQTQEAPSSTSQELGTKGPHPAPLSKFVSSVSTAKLTLEEAYRRLKLLWRVSLPEDGQCPLHCEQIGEMKAEVTKLHKKLFEQEKKLQNTMKLLQLSKRQEKVIFDQLVVTHKILRKARGNLELRPGGAHPGTCSPSRPGS

SEQ ID NO: 27911 - protein, 273 aa, Artificial Sequence; identical to SEQ ID NO: 27910
  Synthetic polypeptide

SEQ ID NO: 27912 - protein, 273 aa, Artificial Sequence; identical to SEQ ID NO: 27910
  Synthetic polypeptide

SEQ ID NO: 27913 - protein, 273 aa, Artificial Sequence; identical to SEQ ID NO: 27910
  Synthetic polypeptide

SEQ ID NO: 27914 - protein, 273 aa, Artificial Sequence; identical to SEQ ID NO: 27910
  Synthetic polypeptide

SEQ ID NO: 27915 - protein, 273 aa, Artificial Sequence; identical to SEQ ID NO: 27910
  Synthetic polypeptide

SEQ ID NO: 27916 - protein, 99 aa, Artificial Sequence
  Synthetic polypeptide
LIIRVILATCSIQFKCCSFSEAFPVLSLPAQIIVFSGSGPSSLCCCTFCSFQRLLHSLGMTRTPSPATVAVRQLALRVCPAWSLATTCGPARMAAMSWA

SEQ ID NO: 27917 - protein, 99 aa, Artificial Sequence; identical to SEQ ID NO: 27916
  Synthetic polypeptide

SEQ ID NO: 27918 - protein, 99 aa, Artificial Sequence; identical to SEQ ID NO: 27916
  Synthetic polypeptide

SEQ ID NO: 27919 - protein, 99 aa, Artificial Sequence; identical to SEQ ID NO: 27916
  Synthetic polypeptide

SEQ ID NO: 27920 - protein, 99 aa, Artificial Sequence; identical to SEQ ID NO: 27916
  Synthetic polypeptide

SEQ ID NO: 27921 - protein, 99 aa, Artificial Sequence; identical to SEQ ID NO: 27916
  Synthetic polypeptide

SEQ ID NO: 27922 - protein, 19 aa, Artificial Sequence
  Synthetic polypeptide
YFLACSKHSVNVSTTCRLS

SEQ ID NO: 27923 - protein, 19 aa, Artificial Sequence
  Synthetic polypeptide
YFLACSKHSVNVSTTCRLS

SEQ ID NO: 27924 - protein, 19 aa, Artificial Sequence
  Synthetic polypeptide
YFLACSKHSVNVSTTCRLS

SEQ ID NO: 27925 - protein, 19 aa, Artificial Sequence
  Synthetic polypeptide
YFLACSKHSVNVSTTCRLS

SEQ ID NO: 27926 - protein, 19 aa, Artificial Sequence
  Synthetic polypeptide
YFLACSKHSVNVSTTCRLS

SEQ ID NO: 27927 - protein, 19 aa, Artificial Sequence
  Synthetic polypeptide
YFLACSKHSVNVSTTCRLS

SEQ ID NO: 27928 - protein, 7 aa, Artificial Sequence
  Synthetic polypeptide
MYQQPAG

SEQ ID NO: 27929 - protein, 7 aa, Artificial Sequence
  Synthetic polypeptide
MYQQPAG

SEQ ID NO: 27930 - protein, 7 aa, Artificial Sequence
  Synthetic polypeptide
MYQQPAG

SEQ ID NO: 27931 - protein, 7 aa, Artificial Sequence
  Synthetic polypeptide
MYQQPAG

SEQ ID NO: 27932 - protein, 7 aa, Artificial Sequence
  Synthetic polypeptide
MYQQPAG

SEQ ID NO: 27933 - protein, 7 aa, Artificial Sequence
  Synthetic polypeptide
MYQQPAG

SEQ ID NO: 27934 - protein, 1281 aa, Artificial Sequence
  Synthetic polypeptide
ALSKCINNLQAELNKIFALRKQLEQDVLSYQNLRKTLEEQISEIRRREEESFSLYSDQTSYLSICLEENNRFQVEHFSQEELKKKVSDLIQLVKELYTDNQHLKKTIFDLSCMGFQGNGFPDRLASTEQTELLASKEDEDTIKIGEDDEINFLSDQHLQQSNEIMKDLSKGGCKNGYLRHTESKISDCDGAHAPGCLEEGAFINLLAPLFNEKATLLLESRPDLLKVVRELLLGQLFLTEQEVSGEHLDGKTEKTPKQKGELVHFVQTNSFSKPHDELKLSCEAQLVKAGEVPKVGLKDASVQTVATEGDLLRFKHEATREAWEEKPINTALSAEHRPENLHGVPGWQAALLSLPGITNREAKKSRLPILIKPSRSLGNMYRLPATQEVVTQLQSQILELQGELKEFKTCNKQLHQKLILAEAVMEGRPTPDKTLLNDSEICPPDDLASLPSCKENPEDVLSPTSVATYLSSKSQPSAKVSVMGTDQSESINTSNETEYLKQKIHDLETELEGYQNFIFQLQKHSQCSEAIITVLCGTEGAQDGLSKPKNGSDGEEMTFSSLHQVRYVKHVKILGPLAPEMIDSRVLENLKQQLEEQEYKLQKEQNLNMQLFSEIHNLQNKFRDLSPPRYDSLVQSQARELSLQRQQIKDGHGICVISRQHMNTMIKAFEELLQASDVDYCVAEGFQEQLNQCAELLEKLEKLFLNGKSVGVEMNTQNELMERIEEDNLTYQHLLPESPEPSASHALSDYETSEKSFFSRDQKQDNETEKTSVMVNSFSQDLLMEHIQEIRTLRKRLEESIKTNEKLRKQLERQGSEFVQGSTSIFASGSELHSSLTSEIHFLRKQNQALNAMLIKGSRDKQKENDKLRESLSRKTVSLEHLQREYASVKEENERLQKEGSEKERHNQQLIQEVRCSGQELSRVQEEVKLRQQLLSQNDKLLQSLRVELKAYEKLDEEHRRLREASGEGWKGQDPFRDLHSLLMEIQALRLQLERSIETSSTLQSRLKEQLARGAEKAQEGALTLAVQAVSIPEVPLQPDKHDGDKYPMESDNSFDLFDSSQAVTPKSVSETPPLSGNDTDSLSCDSGSSATSTPCVSRLVTGHHLWASKNGRHVLGLIEDYEALLKQISQGQRLLAEMDIQTQEAPSSTSQELGTKGPHPAPLSKFVSSVSTAKLTLEEAYRRLKLLWRVSLPEDGQCPLHCEQIGEMKAEVTKLHKKLFEQEKKLQNTMKLLQLSKRQEKVIFDQLVVTHKILRKARGNLELRPGGAHPGTCSPSRPGS

SEQ ID NO: 27935 - protein, 1290 aa, Artificial Sequence
  Synthetic polypeptide
ALSKCINNLQAELNKIFALRKQLEQDVLSYQNLRKTLEEQISEIRRREEESFSLYSDQTSYLSICLEENNRFQVEHFSQEELKKKVSDLIQLVKELYTDNQHLKKTIFDLSCMGFQGNGFPDRLASTEQTEIMKDLSKGGCKNGYLRHTESKISDCDGAHAPGCLEEGAFINLLAPLFNEKATLLLESRPDLLKVVRELLLGQLFLTEQEVSGEHLDGKTEKTPKQKGELVHFVQTNSFSKPHDELKLSCEAQLVKAGEVPKVGLKDASVQTVATEGDLLRFKHEATREAWEEKPINTALSAEHRPENLHGVPGWQAALLSLPGITNREAKKSRLPILIKPSRSLGNMYRLPATQEVVTQLQSQILELQGELKEFKTCNKQLHQKLILAEAVMEGRPTPDKTLLNAQPPVGAAYQDSPGEQKGIKTTSSVWRDKEMDSDQQRSYEIDSEICPPDDLASLPSCKENPEDVLSPTSVATYLSSKSQPSAKVSVMGTDQSESINTSNETEYLKQKIHDLETELEGYQNFIFQLQKHSQCSEAIITVLCGTEGAQDGLSKPKNGSDGEEMTFSSLHQVRYVKHVKILGPLAPEMIDSRVLENLKQQLEEQEYKLQKEQNLNMQLFSEIHNLQNKFRDLSPPRYDSLVQSQARELSLQRQQIKDGHGICVISRQHMNTMIKAFEELLQASDVDYCVAEGFQEQLNQCAELLEKLEKLFLNGKSVGVEMNTQNELMERIEEDNLTYQHLLPESPEPSASHALSDYETSEKSFFSRDQKQDNETEKTSVMVNSFSQDLLMEHIQEIRTLRKRLEESIKTNEKLRKQLERQGSEFVQGSTSIFASGSELHSSLTSEIHFLRKQNQALNAMLIKGSRDKQKENDKLRESLSRKTVSLEHLQREYASVKEENERLQKEGSEKERHNQQLIQEVRCSGQELSRVQEEVKLRQQLLSQNDKLLQSLRVELKAYEKLDEEHRRLREASGEGWKGQDPFRDLHSLLMEIQALRLQLERSIETSSTLQSRLKEQLARGAEKAQEGALTLAVQAVSIPEVPLQPDKHDGDKYPMESDNSFDLFDSSQAVTPKSVSETPPLSGNDTDSLSCDSGSSATSTPCVSRLVTGHHLWASKNGRHVLGLIEDYEALLKQISQGQRLLAEMDIQTQEAPSSTSQELGTKGPHPAPLSKFVSSVSTAKLTLEEAYRRLKLLWRVSLPEDGQCPLHCEQIGEMKAEVTKLHKKLFEQEKKLQNTMKLLQLSKRQEKVIFDQLVVTHKILRKARGNLELRPGGAHPGTCSPSRPGS

SEQ ID NO: 27936 - protein, 1290 aa, Artificial Sequence; identical to SEQ ID NO: 27935
  Synthetic polypeptide

SEQ ID NO: 27937 - protein, 1322 aa, Artificial Sequence
  Synthetic polypeptide
ALSKCINNLQAELNKIFALRKQLEQDVLSYQNLRKTLEEQISEIRRREEESFSLYSDQTSYLSICLEENNRFQVEHFSQEELKKKVSDLIQLVKELYTDNQHLKKTIFDLSCMGFQGNGFPDRLASTEQTELLASKEDEDTIKIGEDDEINFLSDQHLQQSNEIMKDLSKGGCKNGYLRHTESKISDCDGAHAPGCLEEGAFINLLAPLFNEKATLLLESRPDLLKVVRELLLGQLFLTEQEVSGEHLDGKTEKTPKQKGELVHFVQTNSFSKPHDELKLSCEAQLVKAGEVPKVGLKDASVQTVATEGDLLRFKHEATREAWEEKPINTALSAEHRPENLHGVPGWQAALLSLPGITNREAKKSRLPILIKPSRSLGNMYRLPATQEVVTQLQSQILELQGELKEFKTCNKQLHQKLILAEAVMEGRPTPDKTLLNAQPPVGAAYQDSPGEQKGIKTTSSVWRDKEMDSDQQRSYEIDSEICPPDDLASLPSCKENPEDVLSPTSVATYLSSKSQPSAKVSVMGTDQSESINTSNETEYLKQKIHDLETELEGYQNFIFQLQKHSQCSEAIITVLCGTEGAQDGLSKPKNGSDGEEMTFSSLHQVRYVKHVKILGPLAPEMIDSRVLENLKQQLEEQEYKLQKEQNLNMQLFSEIHNLQNKFRDLSPPRYDSLVQSQARELSLQRQQIKDGHGICVISRQHMNTMIKAFEELLQASDVDYCVAEGFQEQLNQCAELLEKLEKLFLNGKSVGVEMNTQNELMERIEEDNLTYQHLLPESPEPSASHALSDYETSEKSFFSRDQKQDNETEKTSVMVNSFSQDLLMEHIQEIRTLRKRLEESIKTNEKLRKQLERQGSEFVQGSTSIFASGSELHSSLTSEIHFLRKQNQALNAMLIKGSRDKQKENDKLRESLSRKTVSLEHLQREYASVKEENERLQKEGSEKERHNQQLIQEVRCSGQELSRVQEEVKLRQQLLSQNDKLLQSLRVELKAYEKLDEEHRRLREASGEGWKGQDPFRDLHSLLMEIQALRLQLERSIETSSTLQSRLKEQLARGAEKAQEGALTLAVQAVSIPEVPLQPDKHDGDKYPMESDNSFDLFDSSQAVTPKSVSETPPLSGNDTDSLSCDSGSSATSTPCVSRLVTGHHLWASKNGRHVLGLIEDYEALLKQISQGQRLLAEMDIQTQEAPSSTSQELGTKGPHPAPLSKFVSSVSTAKLTLEEAYRRLKLLWRVSLPEDGQCPLHCEQIGEMKAEVTKLHKKLFEQEKKLQNTMKLLQLSKRQEKVIFDQLVVTHKILRKARGNLELRPGGAHPGTCSPSRPGS

SEQ ID NO: 27938 - protein, 1243 aa, Artificial Sequence
  Synthetic polypeptide
ALSKCINNLQAELNKIFALRKQLEQDVLSYQNLRKTLEEQISEIRRREEESFSLYSDQTSYLSICLEENNRFQVEHFSQEELKKKVSDLIQLVKELYTDNQHLKKTIFDLSCMGFQGNGFPDRLASTEQTELLASKEDEDTIKIGEDDEINFLSDQHLQQSNEIMKDLSKGGCKNGYLRHTESKISDCDGAHAPGCLEEGAFINLLAPLFNEKATLLLESRPDLLKVVRELLLGQLFLTEQEVSGEHLDGKTEKTPKQKGELVHFVQTNSFSKPHDELKLSCEAQLVKAGEVPKVGLKDASVQTVATEGDLLRFKHEATREAWEEKPINTALSAEHRPENLHGVPGWQAALLSLPGITNREAKKSRLPILIKPSRSLGNMYRLPATQEVVTQLQSQILELQGELKEFKTCNKQLHQKLILAEAVMEGRPTPDKTLLNAQPPVGAAYQDSPGEQKGIKTTSSVWRDKEMDSDQQRSYEIDSEICPPDDLASLPSCKENPEDVLSPTSVATYLSSKSQPSAKVSVMGTDQSESINTSNETEYLKQKIHDLETELEGYQNFIFQLQKHSQCSEAIITVLCGTEGAQDGLSKPKNGSDGEEMTFSSLHQVRYVKHVKILGPLAPEMIDSRVLENLKQQLEEQEYKLQKEQNLNMQLFSEIHNLQNKFRDLSPPRYDSLVQSQARELSLQRQQIKDGHGICVISRQHMNTMIKAFEELLQASDVDYCVAEGFQEQLNQCAELLEKLEKLFLNGKSVGVEMNTQNELMERIEEDNLTYQHLLPESPEPSASHALSDYETSEKSFFSRDQKQDNETEKTSVMVNSFSQDLLMEHIQEIRTLRKRLEESIKTNEKLRKQLERQGSEFVQGSTSIFASGSELHSSLTSEIHFLRKQNQALNAMLIKGSRDKQKENDKLRESLSRKTVSLEHLQREYASVKEENERLQKEGSEKERHNQQLIQEVRCSGQELSRVQEEVKLRQQLLSQNDKLLQSLRVELKAYEKLDEEHRRLRDGDKYPMESDNSFDLFDSSQAVTPKSVSETPPLSGNDTDSLSCDSGSSATSTPCVSRLVTGHHLWASKNGRHVLGLIEDYEALLKQISQGQRLLAEMDIQTQEAPSSTSQELGTKGPHPAPLSKFVSSVSTAKLTLEEAYRRLKLLWRVSLPEDGQCPLHCEQIGEMKAEVTKLHKKLFEQEKKLQNTMKLLQLSKRQEKVIFDQLVVTHKILRKARGNLELRPGGAHPGTCSPSRPGS

SEQ ID NO: 27939 - protein, 179 aa, Artificial Sequence
  Synthetic polypeptide
ALSKCINNLQAELNKIFALRKQLEQDVLSYQNLRKTLEEQISEIRRREEESFSLYSDQTSYLSICLEENNRFQVEHFSQEELKKKVSDLIQLVKELYTDNQHLKKTIFDLSCMGFQGNGFPDRLASTEQTETSLTYSYIFMLHTFLGCIFTPFHAPCSFWLARRTRTRSKLGRMTRLIS

SEQ ID NO: 27940 - protein, 15 aa, Artificial Sequence
  Synthetic polypeptide
VHISALPLSSPELLG

SEQ ID NO: 27941 - protein, 15 aa, Artificial Sequence
  Synthetic polypeptide
VHISALPLSSPELLG

SEQ ID NO: 27942 - protein, 15 aa, Artificial Sequence
  Synthetic polypeptide
VHISALPLSSPELLG

SEQ ID NO: 27943 - protein, 15 aa, Artificial Sequence
  Synthetic polypeptide
VHISALPLSSPELLG

SEQ ID NO: 27944 - protein, 15 aa, Artificial Sequence
  Synthetic polypeptide
VHISALPLSSPELLG

SEQ ID NO: 27945 - protein, 15 aa, Artificial Sequence
  Synthetic polypeptide
VHISALPLSSPELLG

SEQ ID NO: 27946 - protein, 1289 aa, Artificial Sequence
  Synthetic polypeptide
DRPRSTSQLCHSAALSSWAELNKIFALRKQLEQDVLSYQNLRKTLEEQISEIRRREEESFSLYSDQTSYLSICLEENNRFQVEHFSQEELKKKVSDLIQLVKELYTDNQHLKKTIFDLSCMGFQGNGFPDRLASTEQTELLASKEDEDTIKIGEDDEINFLSDQHLQQSNEIMKDLSKGGCKNGYLRHTESKISDCDGAHAPGCLEEGAFINLLAPLFNEKATLLLESRPDLLKVVRELLLGQLFLTEQEVSGEHLDGKTEKTPKQKGELVHFVQTNSFSKPHDELKLSCEAQLVKAGEVPKVGLKDASVQTVATEGDLLRFKHEATREAWEEKPINTALSAEHRPENLHGVPGWQAALLSLPGITNREAKKSRLPILIKPSRSLGNMYRLPATQEVVTQLQSQILELQGELKEFKTCNKQLHQKLILAEAVMEGRPTPDKTLLNDSEICPPDDLASLPSCKENPEDVLSPTSVATYLSSKSQPSAKVSVMGTDQSESINTSNETEYLKQKIHDLETELEGYQNFIFQLQKHSQCSEAIITVLCGTEGAQDGLSKPKNGSDGEEMTFSSLHQVRYVKHVKILGPLAPEMIDSRVLENLKQQLEEQEYKLQKEQNLNMQLFSEIHNLQNKFRDLSPPRYDSLVQSQARELSLQRQQIKDGHGICVISRQHMNTMIKAFEELLQASDVDYCVAEGFQEQLNQCAELLEKLEKLFLNGKSVGVEMNTQNELMERIEEDNLTYQHLLPESPEPSASHALSDYETSEKSFFSRDQKQDNETEKTSVMVNSFSQDLLMEHIQEIRTLRKRLEESIKTNEKLRKQLERQGSEFVQGSTSIFASGSELHSSLTSEIHFLRKQNQALNAMLIKGSRDKQKENDKLRESLSRKTVSLEHLQREYASVKEENERLQKEGSEKERHNQQLIQEVRCSGQELSRVQEEVKLRQQLLSQNDKLLQSLRVELKAYEKLDEEHRRLREASGEGWKGQDPFRDLHSLLMEIQALRLQLERSIETSSTLQSRLKEQLARGAEKAQEGALTLAVQAVSIPEVPLQPDKHDGDKYPMESDNSFDLFDSSQAVTPKSVSETPPLSGNDTDSLSCDSGSSATSTPCVSRLVTGHHLWASKNGRHVLGLIEDYEALLKQISQGQRLLAEMDIQTQEAPSSTSQELGTKGPHPAPLSKFVSSVSTAKLTLEEAYRRLKLLWRVSLPEDGQCPLHCEQIGEMKAEVTKLHKKLFEQEKKLQNTMKLLQLSKRQEKVIFDQLVVTHKILRKARGNLELRPGGAHPGTCSPSRPGS

SEQ ID NO: 27947 - protein, 5 aa, Artificial Sequence
  Synthetic polypeptide
ALGLS

SEQ ID NO: 27948 - protein, 5 aa, Artificial Sequence
  Synthetic polypeptide
ALGLS

SEQ ID NO: 27949 - protein, 5 aa, Artificial Sequence
  Synthetic polypeptide
ALGLS

SEQ ID NO: 27950 - protein, 5 aa, Artificial Sequence
  Synthetic polypeptide
ALGLS

SEQ ID NO: 27951 - protein, 5 aa, Artificial Sequence
  Synthetic polypeptide
ALGLS

SEQ ID NO: 27952 - protein, 5 aa, Artificial Sequence
  Synthetic polypeptide
ALGLS

SEQ ID NO: 27953 - protein, 1298 aa, Artificial Sequence
  Synthetic polypeptide
DRPRSTSQLCHSAALSSWAELNKIFALRKQLEQDVLSYQNLRKTLEEQISEIRRREEESFSLYSDQTSYLSICLEENNRFQVEHFSQEELKKKVSDLIQLVKELYTDNQHLKKTIFDLSCMGFQGNGFPDRLASTEQTEIMKDLSKGGCKNGYLRHTESKISDCDGAHAPGCLEEGAFINLLAPLFNEKATLLLESRPDLLKVVRELLLGQLFLTEQEVSGEHLDGKTEKTPKQKGELVHFVQTNSFSKPHDELKLSCEAQLVKAGEVPKVGLKDASVQTVATEGDLLRFKHEATREAWEEKPINTALSAEHRPENLHGVPGWQAALLSLPGITNREAKKSRLPILIKPSRSLGNMYRLPATQEVVTQLQSQILELQGELKEFKTCNKQLHQKLILAEAVMEGRPTPDKTLLNAQPPVGAAYQDSPGEQKGIKTTSSVWRDKEMDSDQQRSYEIDSEICPPDDLASLPSCKENPEDVLSPTSVATYLSSKSQPSAKVSVMGTDQSESINTSNETEYLKQKIHDLETELEGYQNFIFQLQKHSQCSEAIITVLCGTEGAQDGLSKPKNGSDGEEMTFSSLHQVRYVKHVKILGPLAPEMIDSRVLENLKQQLEEQEYKLQKEQNLNMQLFSEIHNLQNKFRDLSPPRYDSLVQSQARELSLQRQQIKDGHGICVISRQHMNTMIKAFEELLQASDVDYCVAEGFQEQLNQCAELLEKLEKLFLNGKSVGVEMNTQNELMERIEEDNLTYQHLLPESPEPSASHALSDYETSEKSFFSRDQKQDNETEKTSVMVNSFSQDLLMEHIQEIRTLRKRLEESIKTNEKLRKQLERQGSEFVQGSTSIFASGSELHSSLTSEIHFLRKQNQALNAMLIKGSRDKQKENDKLRESLSRKTVSLEHLQREYASVKEENERLQKEGSEKERHNQQLIQEVRCSGQELSRVQEEVKLRQQLLSQNDKLLQSLRVELKAYEKLDEEHRRLREASGEGWKGQDPFRDLHSLLMEIQALRLQLERSIETSSTLQSRLKEQLARGAEKAQEGALTLAVQAVSIPEVPLQPDKHDGDKYPMESDNSFDLFDSSQAVTPKSVSETPPLSGNDTDSLSCDSGSSATSTPCVSRLVTGHHLWASKNGRHVLGLIEDYEALLKQISQGQRLLAEMDIQTQEAPSSTSQELGTKGPHPAPLSKFVSSVSTAKLTLEEAYRRLKLLWRVSLPEDGQCPLHCEQIGEMKAEVTKLHKKLFEQEKKLQNTMKLLQLSKRQEKVIFDQLVVTHKILRKARGNLELRPGGAHPGTCSPSRPGS

SEQ ID NO: 27954 - protein, 1298 aa, Artificial Sequence; identical to SEQ ID NO: 27953
  Synthetic polypeptide

SEQ ID NO: 27955 - protein, 1330 aa, Artificial Sequence
  Synthetic polypeptide
DRPRSTSQLCHSAALSSWAELNKIFALRKQLEQDVLSYQNLRKTLEEQISEIRRREEESFSLYSDQTSYLSICLEENNRFQVEHFSQEELKKKVSDLIQLVKELYTDNQHLKKTIFDLSCMGFQGNGFPDRLASTEQTELLASKEDEDTIKIGEDDEINFLSDQHLQQSNEIMKDLSKGGCKNGYLRHTESKISDCDGAHAPGCLEEGAFINLLAPLFNEKATLLLESRPDLLKVVRELLLGQLFLTEQEVSGEHLDGKTEKTPKQKGELVHFVQTNSFSKPHDELKLSCEAQLVKAGEVPKVGLKDASVQTVATEGDLLRFKHEATREAWEEKPINTALSAEHRPENLHGVPGWQAALLSLPGITNREAKKSRLPILIKPSRSLGNMYRLPATQEVVTQLQSQILELQGELKEFKTCNKQLHQKLILAEAVMEGRPTPDKTLLNAQPPVGAAYQDSPGEQKGIKTTSSVWRDKEMDSDQQRSYEIDSEICPPDDLASLPSCKENPEDVLSPTSVATYLSSKSQPSAKVSVMGTDQSESINTSNETEYLKQKIHDLETELEGYQNFIFQLQKHSQCSEAIITVLCGTEGAQDGLSKPKNGSDGEEMTFSSLHQVRYVKHVKILGPLAPEMIDSRVLENLKQQLEEQEYKLQKEQNLNMQLFSEIHNLQNKFRDLSPPRYDSLVQSQARELSLQRQQIKDGHGICVISRQHMNTMIKAFEELLQASDVDYCVAEGFQEQLNQCAELLEKLEKLFLNGKSVGVEMNTQNELMERIEEDNLTYQHLLPESPEPSASHALSDYETSEKSFFSRDQKQDNETEKTSVMVNSFSQDLLMEHIQEIRTLRKRLEESIKTNEKLRKQLERQGSEFVQGSTSIFASGSELHSSLTSEIHFLRKQNQALNAMLIKGSRDKQKENDKLRESLSRKTVSLEHLQREYASVKEENERLQKEGSEKERHNQQLIQEVRCSGQELSRVQEEVKLRQQLLSQNDKLLQSLRVELKAYEKLDEEHRRLREASGEGWKGQDPFRDLHSLLMEIQALRLQLERSIETSSTLQSRLKEQLARGAEKAQEGALTLAVQAVSIPEVPLQPDKHDGDKYPMESDNSFDLFDSSQAVTPKSVSETPPLSGNDTDSLSCDSGSSATSTPCVSRLVTGHHLWASKNGRHVLGLIEDYEALLKQISQGQRLLAEMDIQTQEAPSSTSQELGTKGPHPAPLSKFVSSVSTAKLTLEEAYRRLKLLWRVSLPEDGQCPLHCEQIGEMKAEVTKLHKKLFEQEKKLQNTMKLLQLSKRQEKVIFDQLVVTHKILRKARGNLELRPGGAHPGTCSPSRPGS

SEQ ID NO: 27956 - protein, 1251 aa, Artificial Sequence
  Synthetic polypeptide
DRPRSTSQLCHSAALSSWAELNKIFALRKQLEQDVLSYQNLRKTLEEQISEIRRREEESFSLYSDQTSYLSICLEENNRFQVEHFSQEELKKKVSDLIQLVKELYTDNQHLKKTIFDLSCMGFQGNGFPDRLASTEQTELLASKEDEDTIKIGEDDEINFLSDQHLQQSNEIMKDLSKGGCKNGYLRHTESKISDCDGAHAPGCLEEGAFINLLAPLFNEKATLLLESRPDLLKVVRELLLGQLFLTEQEVSGEHLDGKTEKTPKQKGELVHFVQTNSFSKPHDELKLSCEAQLVKAGEVPKVGLKDASVQTVATEGDLLRFKHEATREAWEEKPINTALSAEHRPENLHGVPGWQAALLSLPGITNREAKKSRLPILIKPSRSLGNMYRLPATQEVVTQLQSQILELQGELKEFKTCNKQLHQKLILAEAVMEGRPTPDKTLLNAQPPVGAAYQDSPGEQKGIKTTSSVWRDKEMDSDQQRSYEIDSEICPPDDLASLPSCKENPEDVLSPTSVATYLSSKSQPSAKVSVMGTDQSESINTSNETEYLKQKIHDLETELEGYQNFIFQLQKHSQCSEAIITVLCGTEGAQDGLSKPKNGSDGEEMTFSSLHQVRYVKHVKILGPLAPEMIDSRVLENLKQQLEEQEYKLQKEQNLNMQLFSEIHNLQNKFRDLSPPRYDSLVQSQARELSLQRQQIKDGHGICVISRQHMNTMIKAFEELLQASDVDYCVAEGFQEQLNQCAELLEKLEKLFLNGKSVGVEMNTQNELMERIEEDNLTYQHLLPESPEPSASHALSDYETSEKSFFSRDQKQDNETEKTSVMVNSFSQDLLMEHIQEIRTLRKRLEESIKTNEKLRKQLERQGSEFVQGSTSIFASGSELHSSLTSEIHFLRKQNQALNAMLIKGSRDKQKENDKLRESLSRKTVSLEHLQREYASVKEENERLQKEGSEKERHNQQLIQEVRCSGQELSRVQEEVKLRQQLLSQNDKLLQSLRVELKAYEKLDEEHRRLRDGDKYPMESDNSFDLFDSSQAVTPKSVSETPPLSGNDTDSLSCDSGSSATSTPCVSRLVTGHHLWASKNGRHVLGLIEDYEALLKQISQGQRLLAEMDIQTQEAPSSTSQELGTKGPHPAPLSKFVSSVSTAKLTLEEAYRRLKLLWRVSLPEDGQCPLHCEQIGEMKAEVTKLHKKLFEQEKKLQNTMKLLQLSKRQEKVIFDQLVVTHKILRKARGNLELRPGGAHPGTCSPSRPGS

SEQ ID NO: 27957 - protein, 187 aa, Artificial Sequence
  Synthetic polypeptide
DRPRSTSQLCHSAALSSWAELNKIFALRKQLEQDVLSYQNLRKTLEEQISEIRRREEESFSLYSDQTSYLSICLEENNRFQVEHFSQEELKKKVSDLIQLVKELYTDNQHLKKTIFDLSCMGFQGNGFPDRLASTEQTETSLTYSYIFMLHTFLGCIFTPFHAPCSFWLARRTRTRSKLGRMTRLIS

SEQ ID NO: 27958 - protein, 22 aa, Artificial Sequence
  Synthetic polypeptide
VHISALPLSSPELLVSTTCRLS

SEQ ID NO: 27959 - protein, 22 aa, Artificial Sequence
  Synthetic polypeptide
VHISALPLSSPELLVSTTCRLS

SEQ ID NO: 27960 - protein, 22 aa, Artificial Sequence
  Synthetic polypeptide
VHISALPLSSPELLVSTTCRLS

SEQ ID NO: 27961 - protein, 22 aa, Artificial Sequence
  Synthetic polypeptide
VHISALPLSSPELLVSTTCRLS

SEQ ID NO: 27962 - protein, 22 aa, Artificial Sequence
  Synthetic polypeptide
VHISALPLSSPELLVSTTCRLS

SEQ ID NO: 27963 - protein, 22 aa, Artificial Sequence
  Synthetic polypeptide
VHISALPLSSPELLVSTTCRLS

SEQ ID NO: 27964 - protein, 24 aa, Artificial Sequence
  Synthetic polypeptide
DRPRSTSQLCHSAALSSWYQQPAG

SEQ ID NO: 27965 - protein, 24 aa, Artificial Sequence
  Synthetic polypeptide
DRPRSTSQLCHSAALSSWYQQPAG

SEQ ID NO: 27966 - protein, 24 aa, Artificial Sequence
  Synthetic polypeptide
DRPRSTSQLCHSAALSSWYQQPAG

SEQ ID NO: 27967 - protein, 24 aa, Artificial Sequence
  Synthetic polypeptide
DRPRSTSQLCHSAALSSWYQQPAG

SEQ ID NO: 27968 - protein, 24 aa, Artificial Sequence
  Synthetic polypeptide
DRPRSTSQLCHSAALSSWYQQPAG

SEQ ID NO: 27969 - protein, 24 aa, Artificial Sequence
  Synthetic polypeptide
DRPRSTSQLCHSAALSSWYQQPAG

SEQ ID NO: 27970 - protein, 1279 aa, Artificial Sequence
  Synthetic polypeptide
ALGINNLQAELNKIFALRKQLEQDVLSYQNLRKTLEEQISEIRRREEESFSLYSDQTSYLSICLEENNRFQVEHFSQEELKKKVSDLIQLVKELYTDNQHLKKTIFDLSCMGFQGNGFPDRLASTEQTELLASKEDEDTIKIGEDDEINFLSDQHLQQSNEIMKDLSKGGCKNGYLRHTESKISDCDGAHAPGCLEEGAFINLLAPLFNEKATLLLESRPDLLKVVRELLLGQLFLTEQEVSGEHLDGKTEKTPKQKGELVHFVQTNSFSKPHDELKLSCEAQLVKAGEVPKVGLKDASVQTVATEGDLLRFKHEATREAWEEKPINTALSAEHRPENLHGVPGWQAALLSLPGITNREAKKSRLPILIKPSRSLGNMYRLPATQEVVTQLQSQILELQGELKEFKTCNKQLHQKLILAEAVMEGRPTPDKTLLNDSEICPPDDLASLPSCKENPEDVLSPTSVATYLSSKSQPSAKVSVMGTDQSESINTSNETEYLKQKIHDLETELEGYQNFIFQLQKHSQCSEAIITVLCGTEGAQDGLSKPKNGSDGEEMTFSSLHQVRYVKHVKILGPLAPEMIDSRVLENLKQQLEEQEYKLQKEQNLNMQLFSEIHNLQNKFRDLSPPRYDSLVQSQARELSLQRQQIKDGHGICVISRQHMNTMIKAFEELLQASDVDYCVAEGFQEQLNQCAELLEKLEKLFLNGKSVGVEMNTQNELMERIEEDNLTYQHLLPESPEPSASHALSDYETSEKSFFSRDQKQDNETEKTSVMVNSFSQDLLMEHIQEIRTLRKRLEESIKTNEKLRKQLERQGSEFVQGSTSIFASGSELHSSLTSEIHFLRKQNQALNAMLIKGSRDKQKENDKLRESLSRKTVSLEHLQREYASVKEENERLQKEGSEKERHNQQLIQEVRCSGQELSRVQEEVKLRQQLLSQNDKLLQSLRVELKAYEKLDEEHRRLREASGEGWKGQDPFRDLHSLLMEIQALRLQLERSIETSSTLQSRLKEQLARGAEKAQEGALTLAVQAVSIPEVPLQPDKHDGDKYPMESDNSFDLFDSSQAVTPKSVSETPPLSGNDTDSLSCDSGSSATSTPCVSRLVTGHHLWASKNGRHVLGLIEDYEALLKQISQGQRLLAEMDIQTQEAPSSTSQELGTKGPHPAPLSKFVSSVSTAKLTLEEAYRRLKLLWRVSLPEDGQCPLHCEQIGEMKAEVTKLHKKLFEQEKKLQNTMKLLQLSKRQEKVIFDQLVVTHKILRKARGNLELRPGGAHPGTCSPSRPGS

SEQ ID NO: 27971 - protein, 1288 aa, Artificial Sequence
  Synthetic polypeptide
ALGINNLQAELNKIFALRKQLEQDVLSYQNLRKTLEEQISEIRRREEESFSLYSDQTSYLSICLEENNRFQVEHFSQEELKKKVSDLIQLVKELYTDNQHLKKTIFDLSCMGFQGNGFPDRLASTEQTEIMKDLSKGGCKNGYLRHTESKISDCDGAHAPGCLEEGAFINLLAPLFNEKATLLLESRPDLLKVVRELLLGQLFLTEQEVSGEHLDGKTEKTPKQKGELVHFVQTNSFSKPHDELKLSCEAQLVKAGEVPKVGLKDASVQTVATEGDLLRFKHEATREAWEEKPINTALSAEHRPENLHGVPGWQAALLSLPGITNREAKKSRLPILIKPSRSLGNMYRLPATQEVVTQLQSQILELQGELKEFKTCNKQLHQKLILAEAVMEGRPTPDKTLLNAQPPVGAAYQDSPGEQKGIKTTSSVWRDKEMDSDQQRSYEIDSEICPPDDLASLPSCKENPEDVLSPTSVATYLSSKSQPSAKVSVMGTDQSESINTSNETEYLKQKIHDLETELEGYQNFIFQLQKHSQCSEAIITVLCGTEGAQDGLSKPKNGSDGEEMTFSSLHQVRYVKHVKILGPLAPEMIDSRVLENLKQQLEEQEYKLQKEQNLNMQLFSEIHNLQNKFRDLSPPRYDSLVQSQARELSLQRQQIKDGHGICVISRQHMNTMIKAFEELLQASDVDYCVAEGFQEQLNQCAELLEKLEKLFLNGKSVGVEMNTQNELMERIEEDNLTYQHLLPESPEPSASHALSDYETSEKSFFSRDQKQDNETEKTSVMVNSFSQDLLMEHIQEIRTLRKRLEESIKTNEKLRKQLERQGSEFVQGSTSIFASGSELHSSLTSEIHFLRKQNQALNAMLIKGSRDKQKENDKLRESLSRKTVSLEHLQREYASVKEENERLQKEGSEKERHNQQLIQEVRCSGQELSRVQEEVKLRQQLLSQNDKLLQSLRVELKAYEKLDEEHRRLREASGEGWKGQDPFRDLHSLLMEIQALRLQLERSIETSSTLQSRLKEQLARGAEKAQEGALTLAVQAVSIPEVPLQPDKHDGDKYPMESDNSFDLFDSSQAVTPKSVSETPPLSGNDTDSLSCDSGSSATSTPCVSRLVTGHHLWASKNGRHVLGLIEDYEALLKQISQGQRLLAEMDIQTQEAPSSTSQELGTKGPHPAPLSKFVSSVSTAKLTLEEAYRRLKLLWRVSLPEDGQCPLHCEQIGEMKAEVTKLHKKLFEQEKKLQNTMKLLQLSKRQEKVIFDQLVVTHKILRKARGNLELRPGGAHPGTCSPSRPGS

SEQ ID NO: 27972 - protein, 1288 aa, Artificial Sequence; identical to SEQ ID NO: 27971
  Synthetic polypeptide

SEQ ID NO: 27973 - protein, 1320 aa, Artificial Sequence
  Synthetic polypeptide
ALGINNLQAELNKIFALRKQLEQDVLSYQNLRKTLEEQISEIRRREEESFSLYSDQTSYLSICLEENNRFQVEHFSQEELKKKVSDLIQLVKELYTDNQHLKKTIFDLSCMGFQGNGFPDRLASTEQTELLASKEDEDTIKIGEDDEINFLSDQHLQQSNEIMKDLSKGGCKNGYLRHTESKISDCDGAHAPGCLEEGAFINLLAPLFNEKATLLLESRPDLLKVVRELLLGQLFLTEQEVSGEHLDGKTEKTPKQKGELVHFVQTNSFSKPHDELKLSCEAQLVKAGEVPKVGLKDASVQTVATEGDLLRFKHEATREAWEEKPINTALSAEHRPENLHGVPGWQAALLSLPGITNREAKKSRLPILIKPSRSLGNMYRLPATQEVVTQLQSQILELQGELKEFKTCNKQLHQKLILAEAVMEGRPTPDKTLLNAQPPVGAAYQDSPGEQKGIKTTSSVWRDKEMDSDQQRSYEIDSEICPPDDLASLPSCKENPEDVLSPTSVATYLSSKSQPSAKVSVMGTDQSESINTSNETEYLKQKIHDLETELEGYQNFIFQLQKHSQCSEAIITVLCGTEGAQDGLSKPKNGSDGEEMTFSSLHQVRYVKHVKILGPLAPEMIDSRVLENLKQQLEEQEYKLQKEQNLNMQLFSEIHNLQNKFRDLSPPRYDSLVQSQARELSLQRQQIKDGHGICVISRQHMNTMIKAFEELLQASDVDYCVAEGFQEQLNQCAELLEKLEKLFLNGKSVGVEMNTQNELMERIEEDNLTYQHLLPESPEPSASHALSDYETSEKSFFSRDQKQDNETEKTSVMVNSFSQDLLMEHIQEIRTLRKRLEESIKTNEKLRKQLERQGSEFVQGSTSIFASGSELHSSLTSEIHFLRKQNQALNAMLIKGSRDKQKENDKLRESLSRKTVSLEHLQREYASVKEENERLQKEGSEKERHNQQLIQEVRCSGQELSRVQEEVKLRQQLLSQNDKLLQSLRVELKAYEKLDEEHRRLREASGEGWKGQDPFRDLHSLLMEIQALRLQLERSIETSSTLQSRLKEQLARGAEKAQEGALTLAVQAVSIPEVPLQPDKHDGDKYPMESDNSFDLFDSSQAVTPKSVSETPPLSGNDTDSLSCDSGSSATSTPCVSRLVTGHHLWASKNGRHVLGLIEDYEALLKQISQGQRLLAEMDIQTQEAPSSTSQELGTKGPHPAPLSKFVSSVSTAKLTLEEAYRRLKLLWRVSLPEDGQCPLHCEQIGEMKAEVTKLHKKLFEQEKKLQNTMKLLQLSKRQEKVIFDQLVVTHKILRKARGNLELRPGGAHPGTCSPSRPGS

SEQ ID NO: 27974 - protein, 1241 aa, Artificial Sequence
  Synthetic polypeptide
ALGINNLQAELNKIFALRKQLEQDVLSYQNLRKTLEEQISEIRRREEESFSLYSDQTSYLSICLEENNRFQVEHFSQEELKKKVSDLIQLVKELYTDNQHLKKTIFDLSCMGFQGNGFPDRLASTEQTELLASKEDEDTIKIGEDDEINFLSDQHLQQSNEIMKDLSKGGCKNGYLRHTESKISDCDGAHAPGCLEEGAFINLLAPLFNEKATLLLESRPDLLKVVRELLLGQLFLTEQEVSGEHLDGKTEKTPKQKGELVHFVQTNSFSKPHDELKLSCEAQLVKAGEVPKVGLKDASVQTVATEGDLLRFKHEATREAWEEKPINTALSAEHRPENLHGVPGWQAALLSLPGITNREAKKSRLPILIKPSRSLGNMYRLPATQEVVTQLQSQILELQGELKEFKTCNKQLHQKLILAEAVMEGRPTPDKTLLNAQPPVGAAYQDSPGEQKGIKTTSSVWRDKEMDSDQQRSYEIDSEICPPDDLASLPSCKENPEDVLSPTSVATYLSSKSQPSAKVSVMGTDQSESINTSNETEYLKQKIHDLETELEGYQNFIFQLQKHSQCSEAIITVLCGTEGAQDGLSKPKNGSDGEEMTFSSLHQVRYVKHVKILGPLAPEMIDSRVLENLKQQLEEQEYKLQKEQNLNMQLFSEIHNLQNKFRDLSPPRYDSLVQSQARELSLQRQQIKDGHGICVISRQHMNTMIKAFEELLQASDVDYCVAEGFQEQLNQCAELLEKLEKLFLNGKSVGVEMNTQNELMERIEEDNLTYQHLLPESPEPSASHALSDYETSEKSFFSRDQKQDNETEKTSVMVNSFSQDLLMEHIQEIRTLRKRLEESIKTNEKLRKQLERQGSEFVQGSTSIFASGSELHSSLTSEIHFLRKQNQALNAMLIKGSRDKQKENDKLRESLSRKTVSLEHLQREYASVKEENERLQKEGSEKERHNQQLIQEVRCSGQELSRVQEEVKLRQQLLSQNDKLLQSLRVELKAYEKLDEEHRRLRDGDKYPMESDNSFDLFDSSQAVTPKSVSETPPLSGNDTDSLSCDSGSSATSTPCVSRLVTGHHLWASKNGRHVLGLIEDYEALLKQISQGQRLLAEMDIQTQEAPSSTSQELGTKGPHPAPLSKFVSSVSTAKLTLEEAYRRLKLLWRVSLPEDGQCPLHCEQIGEMKAEVTKLHKKLFEQEKKLQNTMKLLQLSKRQEKVIFDQLVVTHKILRKARGNLELRPGGAHPGTCSPSRPGS

SEQ ID NO: 27975 - protein, 177 aa, Artificial Sequence
  Synthetic polypeptide
ALGINNLQAELNKIFALRKQLEQDVLSYQNLRKTLEEQISEIRRREEESFSLYSDQTSYLSICLEENNRFQVEHFSQEELKKKVSDLIQLVKELYTDNQHLKKTIFDLSCMGFQGNGFPDRLASTEQTETSLTYSYIFMLHTFLGCIFTPFHAPCSFWLARRTRTRSKLGRMTRLIS

SEQ ID NO: 27976 - protein, 33 aa, Artificial Sequence
  Synthetic polypeptide
LRFGDSKQVVLLSPCFDFFSGKGQMTCLQSCGM

SEQ ID NO: 27977 - protein, 33 aa, Artificial Sequence; identical to SEQ ID NO: 27976
  Synthetic polypeptide

SEQ ID NO: 27978 - protein, 35 aa, Artificial Sequence
  Synthetic polypeptide
KKLGFCPSAFDSVLVTLSKLCYSLRALISSVVKVR

SEQ ID NO: 27979 - protein, 35 aa, Artificial Sequence; identical to SEQ ID NO: 27978
  Synthetic polypeptide

SEQ ID NO: 27980 - protein, 130 aa, Artificial Sequence
  Synthetic polypeptide
STPTRGQLESKQTSSAAGDYKGRCLQSPPVPVPQTRALQGPSARLPRVVAIPVGPWSPGAVPPSHATTALCVCPRVQIPPASAATACRVSRAHAASWTSMSVHPGRATMGPPAATWPIATSAIAPLAMQA

SEQ ID NO: 27981 - protein, 130 aa, Artificial Sequence; identical to SEQ ID NO: 27980
  Synthetic polypeptide

SEQ ID NO: 27982 - protein, 99 aa, Artificial Sequence
  Synthetic polypeptide
PPQQEASWRASKHRVQQETIRDGAFRAPQCLCLRPVRSRDRVPGYREWWLYLWAHGAPGLCHPAMPPRRSVCAPGSRSHRLPLLLRAGFPGPTLRAGHR

SEQ ID NO: 27983 - protein, 99 aa, Artificial Sequence; identical to SEQ ID NO: 27982
  Synthetic polypeptide

SEQ ID NO: 27984 - protein, 221 aa, Artificial Sequence
  Synthetic polypeptide
SQLLRRQLNHPNIIKYLDSFIEDNELNIVLELADAGDLSQMIKYFKKQKRLIPERTVWKYFVQLCSAVEHMHSRRVMHRDIKPANVFITATGVVKLGDLGLGRFFSSETTAAHSLVGTPYYMSPERIHENGYNFKSDIWSLGCLLYEMAALQSPFYGDKMNLFSLCQKIEQCDYPPLPGEHYSEKLRELVSMCICPDPHQRPDIGYVHQVAKQMHIWMSST

SEQ ID NO: 27985 - protein, 221 aa, Artificial Sequence; identical to SEQ ID NO: 27984
  Synthetic polypeptide

SEQ ID NO: 27986 - protein, 221 aa, Artificial Sequence; identical to SEQ ID NO: 27984
  Synthetic polypeptide

SEQ ID NO: 27987 - protein, 221 aa, Artificial Sequence; identical to SEQ ID NO: 27984
  Synthetic polypeptide

SEQ ID NO: 27988 - protein, 221 aa, Artificial Sequence; identical to SEQ ID NO: 27984
  Synthetic polypeptide

SEQ ID NO: 27989 - protein, 221 aa, Artificial Sequence; identical to SEQ ID NO: 27984
  Synthetic polypeptide

SEQ ID NO: 27990 - protein, 221 aa, Artificial Sequence; identical to SEQ ID NO: 27984
  Synthetic polypeptide

SEQ ID NO: 27991 - protein, 221 aa, Artificial Sequence; identical to SEQ ID NO: 27984
  Synthetic polypeptide

SEQ ID NO: 27992 - protein, 16 aa, Artificial Sequence
  Synthetic polypeptide
PGMVACSRSPNCSGGN

SEQ ID NO: 27993 - protein, 16 aa, Artificial Sequence
  Synthetic polypeptide
PGMVACSRSPNCSGGN

SEQ ID NO: 27994 - protein, 16 aa, Artificial Sequence
  Synthetic polypeptide
PGMVACSRSPNCSGGN

SEQ ID NO: 27995 - protein, 16 aa, Artificial Sequence
  Synthetic polypeptide
PGMVACSRSPNCSGGN

SEQ ID NO: 27996 - protein, 16 aa, Artificial Sequence
  Synthetic polypeptide
PGMVACSRSPNCSGGN

SEQ ID NO: 27997 - protein, 16 aa, Artificial Sequence
  Synthetic polypeptide
PGMVACSRSPNCSGGN

SEQ ID NO: 27998 - protein, 16 aa, Artificial Sequence
  Synthetic polypeptide
PGMVACSRSPNCSGGN

SEQ ID NO: 27999 - protein, 16 aa, Artificial Sequence
  Synthetic polypeptide
PGMVACSRSPNCSGGN

SEQ ID NO: 28000 - protein, 16 aa, Artificial Sequence
  Synthetic polypeptide
PGMVACSRSPNCSGGN

SEQ ID NO: 28001 - protein, 16 aa, Artificial Sequence
  Synthetic polypeptide
PGMVACSRSPNCSGGN

SEQ ID NO: 28002 - protein, 16 aa, Artificial Sequence
  Synthetic polypeptide
PGMVACSRSPNCSGGN

SEQ ID NO: 28003 - protein, 16 aa, Artificial Sequence
  Synthetic polypeptide
PGMVACSRSPNCSGGN

SEQ ID NO: 28004 - protein, 16 aa, Artificial Sequence
  Synthetic polypeptide
PGMVACSRSPNCSGGN

SEQ ID NO: 28005 - protein, 16 aa, Artificial Sequence
  Synthetic polypeptide
PGMVACSRSPNCSGGN

SEQ ID NO: 28006 - protein, 16 aa, Artificial Sequence
  Synthetic polypeptide
PGMVACSRSPNCSGGN

SEQ ID NO: 28007 - protein, 41 aa, Artificial Sequence
  Synthetic polypeptide
QAWWHAAVVPTAQEATEPPKYHQVFGLVYRRQRAEHCAGVG

SEQ ID NO: 28008 - protein, 41 aa, Artificial Sequence; identical to SEQ ID NO: 28007
  Synthetic polypeptide

SEQ ID NO: 28009 - protein, 41 aa, Artificial Sequence; identical to SEQ ID NO: 28007
  Synthetic polypeptide

SEQ ID NO: 28010 - protein, 41 aa, Artificial Sequence; identical to SEQ ID NO: 28007
  Synthetic polypeptide

SEQ ID NO: 28011 - protein, 41 aa, Artificial Sequence; identical to SEQ ID NO: 28007
  Synthetic polypeptide

SEQ ID NO: 28012 - protein, 41 aa, Artificial Sequence; identical to SEQ ID NO: 28007
  Synthetic polypeptide

SEQ ID NO: 28013 - protein, 41 aa, Artificial Sequence; identical to SEQ ID NO: 28007
  Synthetic polypeptide

SEQ ID NO: 28014 - protein, 41 aa, Artificial Sequence; identical to SEQ ID NO: 28007
  Synthetic polypeptide

SEQ ID NO: 28015 - protein, 41 aa, Artificial Sequence; identical to SEQ ID NO: 28007
  Synthetic polypeptide

SEQ ID NO: 28016 - protein, 41 aa, Artificial Sequence; identical to SEQ ID NO: 28007
  Synthetic polypeptide

SEQ ID NO: 28017 - protein, 41 aa, Artificial Sequence; identical to SEQ ID NO: 28007
  Synthetic polypeptide

SEQ ID NO: 28018 - protein, 41 aa, Artificial Sequence; identical to SEQ ID NO: 28007
  Synthetic polypeptide

SEQ ID NO: 28019 - protein, 41 aa, Artificial Sequence; identical to SEQ ID NO: 28007
  Synthetic polypeptide

SEQ ID NO: 28020 - protein, 41 aa, Artificial Sequence; identical to SEQ ID NO: 28007
  Synthetic polypeptide

SEQ ID NO: 28021 - protein, 41 aa, Artificial Sequence; identical to SEQ ID NO: 28007
  Synthetic polypeptide

SEQ ID NO: 28022 - protein, 127 aa, Artificial Sequence
  Synthetic polypeptide
SQLLRRQLNHPNIIKYLDSFIEDNELNIVLELADAGDLSQMIKYFKKQKRLIPERTVWKYFVQLCSAVEHMHSRRVMHRDIKPANVFITATGVVKLGDLGLGRFFSSETTAAHSLVGTPYYMSPERI

SEQ ID NO: 28023 - protein, 176 aa, Artificial Sequence
  Synthetic polypeptide
SQLLRRQLNHPNIIKYLDSFIEDNELNIVLELADAGDLSQMIKYFKKQKRLIPERTVWKYFVQLCSAVEHMHSRRVMHRDIKPANVFITATGVVKLGDLGLGRFFSSETTAAHSLVGTPYYMSPERIHENGYNFKSDIWSLGCLLYEMAALQSPFYGDKMNLFSLCQKIEQCDYPP

SEQ ID NO: 28024 - protein, 115 aa, Artificial Sequence
  Synthetic polypeptide
SQLLRRQLNHPNIIKYLDSFIEDNELNIVLELADAGDLSQMIKYFKKQKRLIPERTVWKYFVQLCSAVEHMHSRRVMHRDIKPANVFITATGVVKLGDLGLGRFFSSETTAAHSL

SEQ ID NO: 28025 - protein, 130 aa, Artificial Sequence
  Synthetic polypeptide
SQLLRRQLNHPNIIKYLDSFIEDNELNIVLELADAGDLSQMIKYFKKQKRLIPERTVWKYFVQLCSAVEHMHSRRVMHRDIKPANVFITATGVVKLGDLGLGRFFSSETTAAHSLVGTPYYMSPERIHEN

SEQ ID NO: 28026 - protein, 68 aa, Artificial Sequence
  Synthetic polypeptide
SQLLRRQLNHPNIIKYLDSFIEDNELNIVLELADAGDLSQMIKYFKKQKRLIPERTVWKYFVQLCSAV

SEQ ID NO: 28027 - protein, 128 aa, Artificial Sequence
  Synthetic polypeptide
SQLLRRQLNHPNIIKYLDSFIEDNELNIVLELADAGDLSQMIKYFKKQKRLIPERTVWKYFVQLCSAVEHMHSRRVMHRDIKPANVFITATGVVKLGDLGLGRFFSSETTAAHSLVGTPYYMSPERIH

SEQ ID NO: 28028 - protein, 79 aa, Artificial Sequence
  Synthetic polypeptide
SQLLRRQLNHPNIIKYLDSFIEDNELNIVLELADAGDLSQMIKYFKKQKRLIPERTVWKYFVQLCSAVEHMHSRRVMHR

SEQ ID NO: 28029 - protein, 67 aa, Artificial Sequence
  Synthetic polypeptide
VSHLTSLSLSFLTYTMGIILNLPHRISIRIKLRELVSMCICPDPHQRPDIGYVHQVAKQMHIWMSST

SEQ ID NO: 28030 - protein, 67 aa, Artificial Sequence; identical to SEQ ID NO: 28029
  Synthetic polypeptide

SEQ ID NO: 28031 - protein, 67 aa, Artificial Sequence; identical to SEQ ID NO: 28029
  Synthetic polypeptide

SEQ ID NO: 28032 - protein, 67 aa, Artificial Sequence; identical to SEQ ID NO: 28029
  Synthetic polypeptide

SEQ ID NO: 28033 - protein, 67 aa, Artificial Sequence; identical to SEQ ID NO: 28029
  Synthetic polypeptide

SEQ ID NO: 28034 - protein, 67 aa, Artificial Sequence; identical to SEQ ID NO: 28029
  Synthetic polypeptide

SEQ ID NO: 28035 - protein, 67 aa, Artificial Sequence; identical to SEQ ID NO: 28029
  Synthetic polypeptide

SEQ ID NO: 28036 - protein, 67 aa, Artificial Sequence; identical to SEQ ID NO: 28029
  Synthetic polypeptide

SEQ ID NO: 28037 - protein, 39 aa, Artificial Sequence
  Synthetic polypeptide
GLSYENWSACASALTPTRDLTSDTCTRWPSRCTSGCPAP

SEQ ID NO: 28038 - protein, 39 aa, Artificial Sequence; identical to SEQ ID NO: 28037
  Synthetic polypeptide

SEQ ID NO: 28039 - protein, 39 aa, Artificial Sequence; identical to SEQ ID NO: 28037
  Synthetic polypeptide

SEQ ID NO: 28040 - protein, 39 aa, Artificial Sequence; identical to SEQ ID NO: 28037
  Synthetic polypeptide

SEQ ID NO: 28041 - protein, 39 aa, Artificial Sequence; identical to SEQ ID NO: 28037
  Synthetic polypeptide

SEQ ID NO: 28042 - protein, 39 aa, Artificial Sequence; identical to SEQ ID NO: 28037
  Synthetic polypeptide

SEQ ID NO: 28043 - protein, 39 aa, Artificial Sequence; identical to SEQ ID NO: 28037
  Synthetic polypeptide

SEQ ID NO: 28044 - protein, 39 aa, Artificial Sequence; identical to SEQ ID NO: 28037
  Synthetic polypeptide

SEQ ID NO: 28045 - protein, 53 aa, Artificial Sequence
  Synthetic polypeptide
GLARWHTPVIPALWEAKVGGSPEVSRLHWCSPSFRGSRCYWTSPLQHLSSWIN

SEQ ID NO: 28046 - protein, 53 aa, Artificial Sequence; identical to SEQ ID NO: 28045
  Synthetic polypeptide

SEQ ID NO: 28047 - protein, 159 aa, Artificial Sequence
  Synthetic polypeptide
SQHFGRPRLADHLRYQGYIGAALVLGGVDVTGPHLYSIYPHGSTDKLPYVTMGSGSLAAMAVFEDKFRPDMEEEEAKNLVSEAIAAGIFNDLGSGSNIDLCVISKNKLDFLRPYTVPNKKGTRLGRYRCEKGTTAVLTEKITPLEIEVLEETVQTMDTS

SEQ ID NO: 28048 - protein, 92 aa, Artificial Sequence
  Synthetic polypeptide
SQHFGRPRLADHLRYQGYIGAALVLGGVDVTGPHLYSIYPHGSTDKLPYVTMVHCEEELFTENLFFIRQAEVVSEEAWGPSFAISLAVFLVA

SEQ ID NO: 28049 - protein, 14 aa, Artificial Sequence
  Synthetic polypeptide
CDGRSRDLGSDRMA

SEQ ID NO: 28050 - protein, 14 aa, Artificial Sequence
  Synthetic polypeptide
CDGRSRDLGSDRMA

SEQ ID NO: 28051 - protein, 14 aa, Artificial Sequence
  Synthetic polypeptide
CDGRSRDLGSDRMA

SEQ ID NO: 28052 - protein, 23 aa, Artificial Sequence
  Synthetic polypeptide
VMGDHEIWGQTGWHSSWSRYKSN

SEQ ID NO: 28053 - protein, 23 aa, Artificial Sequence
  Synthetic polypeptide
VMGDHEIWGQTGWHSSWSRYKSN

SEQ ID NO: 28054 - protein, 23 aa, Artificial Sequence
  Synthetic polypeptide
VMGDHEIWGQTGWHSSWSRYKSN

SEQ ID NO: 28055 - protein, 235 aa, Artificial Sequence
  Synthetic polypeptide
WEITRFGVRQDGIVLGADTRATEGMVVADKNCSKIHFISPNIYCCGAGTAADTDMTTQLISSNLELHSLSTGRLPRVVTANRMLKQMLFRYQGYIGAALVLGGVDVTGPHLYSIYPHGSTDKLPYVTMGSGSLAAMAVFEDKFRPDMEEEEAKNLVSEAIAAGIFNDLGSGSNIDLCVISKNKLDFLRPYTVPNKKGTRLGRYRCEKGTTAVLTEKITPLEIEVLEETVQTMDTS

SEQ ID NO: 28056 - protein, 100 aa, Artificial Sequence
  Synthetic polypeptide
WEITRFGVRQDGIVLGADTRATEGMVVADKNCSKIHFISPNIYCCGAGTAADTDMTTQLISSNLELHSLSTGRLPRVVTANRMLKQMLFRFWLLGSNGCI

SEQ ID NO: 28057 - protein, 168 aa, Artificial Sequence
  Synthetic polypeptide
WEITRFGVRQDGIVLGADTRATEGMVVADKNCSKIHFISPNIYCCGAGTAADTDMTTQLISSNLELHSLSTGRLPRVVTANRMLKQMLFRYQGYIGAALVLGGVDVTGPHLYSIYPHGSTDKLPYVTMVHCEEELFTENLFFIRQAEVVSEEAWGPSFAISLAVFLVA

SEQ ID NO: 28058 - protein, 161 aa, Artificial Sequence
  Synthetic polypeptide
ITKATGPQYRLEKQSEPNVAVDLDSTLESQSAWEFCLVRENSISGDKVEIDPVTNQKASTKFWIKQKPISIDSDLLCACDLAEEKSPSHAIFKLTYLSNHDYKHLYFESDAATVNEIVLKVNYILESRASTARADYFAQKQRKLNRRTSFSFQKEKKSGQQ

SEQ ID NO: 28059 - protein, 55 aa, Artificial Sequence
  Synthetic polypeptide
SHSLSRVRSQRQQALSTAWRSRASPMSPLTWTALWRARAHGSSAWSARTVSLETK

SEQ ID NO: 28060 - protein, 28 aa, Artificial Sequence
  Synthetic polypeptide
ATAYPGLDHKGNRPSVPPGEAERAQCRR

SEQ ID NO: 28061 - protein, 28 aa, Artificial Sequence
  Synthetic polypeptide
ATAYPGLDHKGNRPSVPPGEAERAQCRR

SEQ ID NO: 28062 - protein, 28 aa, Artificial Sequence
  Synthetic polypeptide
ATAYPGLDHKGNRPSVPPGEAERAQCRR

SEQ ID NO: 28063 - protein, 28 aa, Artificial Sequence
  Synthetic polypeptide
ATAYPGLDHKGNRPSVPPGEAERAQCRR

SEQ ID NO: 28064 - protein, 28 aa, Artificial Sequence
  Synthetic polypeptide
ATAYPGLDHKGNRPSVPPGEAERAQCRR

SEQ ID NO: 28065 - protein, 208 aa, Artificial Sequence
  Synthetic polypeptide
ITKATGPQYRLEKQSEPNVAVDLDSTLESQSAWEFCLVRENSSRADGVFEEDSQIDIATVQDMLSSHHYKSFKVSMIHRLRFTTDVQLGISGDKVEIDPVTNQKASTKFWIKQKPISIDSDLLCACDLAEEKSPSHAIFKLTYLSNHDYKHLYFESDAATVNEIVLKVNYILESRASTARADYFAQKQRKLNRRTSFSFQKEKKSGQQ

SEQ ID NO: 28066 - protein, 208 aa, Artificial Sequence; identical to SEQ ID NO: 28065
  Synthetic polypeptide

SEQ ID NO: 28067 - protein, 208 aa, Artificial Sequence; identical to SEQ ID NO: 28065
  Synthetic polypeptide

SEQ ID NO: 28068 - protein, 208 aa, Artificial Sequence; identical to SEQ ID NO: 28065
  Synthetic polypeptide

SEQ ID NO: 28069 - protein, 64 aa, Artificial Sequence
  Synthetic polypeptide
SHSLSRVRSQRQQALSTAWRSRASPMSPLTWTALWRARAHGSSAWSARTVQGQTGFLRRIRKLT

SEQ ID NO: 28070 - protein, 64 aa, Artificial Sequence; identical to SEQ ID NO: 28069
  Synthetic polypeptide

SEQ ID NO: 28071 - protein, 64 aa, Artificial Sequence; identical to SEQ ID NO: 28069
  Synthetic polypeptide

SEQ ID NO: 28072 - protein, 64 aa, Artificial Sequence; identical to SEQ ID NO: 28069
  Synthetic polypeptide

SEQ ID NO: 28073 - protein, 9 aa, Artificial Sequence
  Synthetic polypeptide
ITKATGACD

SEQ ID NO: 28074 - protein, 17 aa, Artificial Sequence
  Synthetic polypeptide
SHSLSRVRSQRQQVLVT

SEQ ID NO: 28075 - protein, 15 aa, Artificial Sequence
  Synthetic polypeptide
ATAYPGLDHKGNRCL

SEQ ID NO: 28076 - protein, 28 aa, Artificial Sequence
  Synthetic polypeptide
ELSSDPCKAPRTQPSVPPGEAERAQCRR

SEQ ID NO: 28077 - protein, 28 aa, Artificial Sequence
  Synthetic polypeptide
ELSSDPCKAPRTQPSVPPGEAERAQCRR

SEQ ID NO: 28078 - protein, 28 aa, Artificial Sequence
  Synthetic polypeptide
ELSSDPCKAPRTQPSVPPGEAERAQCRR

SEQ ID NO: 28079 - protein, 28 aa, Artificial Sequence
  Synthetic polypeptide
ELSSDPCKAPRTQPSVPPGEAERAQCRR

SEQ ID NO: 28080 - protein, 28 aa, Artificial Sequence
  Synthetic polypeptide
ELSSDPCKAPRTQPSVPPGEAERAQCRR

SEQ ID NO: 28081 - protein, 166 aa, Artificial Sequence
  Synthetic polypeptide
AAILAKHQGPSPQYRLEKQSEPNVAVDLDSTLESQSAWEFCLVRENSISGDKVEIDPVTNQKASTKFWIKQKPISIDSDLLCACDLAEEKSPSHAIFKLTYLSNHDYKHLYFESDAATVNEIVLKVNYILESRASTARADYFAQKQRKLNRRTSFSFQKEKKSGQQ

SEQ ID NO: 28082 - protein, 63 aa, Artificial Sequence
  Synthetic polypeptide
CLLHSIIVRIKQRSLQSTKDPALSTAWRSRASPMSPLTWTALWRARAHGSSAWSARTVSLETK

SEQ ID NO: 28083 - protein, 213 aa, Artificial Sequence
  Synthetic polypeptide
AAILAKHQGPSPQYRLEKQSEPNVAVDLDSTLESQSAWEFCLVRENSSRADGVFEEDSQIDIATVQDMLSSHHYKSFKVSMIHRLRFTTDVQLGISGDKVEIDPVTNQKASTKFWIKQKPISIDSDLLCACDLAEEKSPSHAIFKLTYLSNHDYKHLYFESDAATVNEIVLKVNYILESRASTARADYFAQKQRKLNRRTSFSFQKEKKSGQQ

SEQ ID NO: 28084 - protein, 213 aa, Artificial Sequence; identical to SEQ ID NO: 28083
  Synthetic polypeptide

SEQ ID NO: 28085 - protein, 213 aa, Artificial Sequence; identical to SEQ ID NO: 28083
  Synthetic polypeptide

SEQ ID NO: 28086 - protein, 213 aa, Artificial Sequence; identical to SEQ ID NO: 28083
  Synthetic polypeptide

SEQ ID NO: 28087 - protein, 72 aa, Artificial Sequence
  Synthetic polypeptide
CLLHSIIVRIKQRSLQSTKDPALSTAWRSRASPMSPLTWTALWRARAHGSSAWSARTVQGQTGFLRRIRKLT

SEQ ID NO: 28088 - protein, 72 aa, Artificial Sequence; identical to SEQ ID NO: 28087
  Synthetic polypeptide

SEQ ID NO: 28089 - protein, 72 aa, Artificial Sequence; identical to SEQ ID NO: 28087
  Synthetic polypeptide

SEQ ID NO: 28090 - protein, 72 aa, Artificial Sequence; identical to SEQ ID NO: 28087
  Synthetic polypeptide

SEQ ID NO: 28091 - protein, 15 aa, Artificial Sequence
  Synthetic polypeptide
ELSSDPCKAPRTQCL

SEQ ID NO: 28092 - protein, 14 aa, Artificial Sequence
  Synthetic polypeptide
AAILAKHQGPSACD

SEQ ID NO: 28093 - protein, 25 aa, Artificial Sequence
  Synthetic polypeptide
CLLHSIIVRIKQRSLQSTKDPVLVT

SEQ ID NO: 28094 - protein, 342 aa, Artificial Sequence
  Synthetic polypeptide
GQARWLTPVIPALGRPRQPDHLRSGVQAATSPEGHVGTTATKKIDVYLPLHSSQDRLLPMTVVTMASARVQDLIGLICWQYTSEGREPKLNDNVSAYCLHIAEDDGEVDTDFPPLDSNEPIHKFGFSTLALVEKYSSPGLTSKESLFVRINAAHGFSLIQVDNTKVTMKEILLKAVKRRKGSQKVSGPQYRLEKQSEPNVAVDLDSTLESQSAWEFCLVRENSISGDKVEIDPVTNQKASTKFWIKQKPISIDSDLLCACDLAEEKSPSHAIFKLTYLSNHDYKHLYFESDAATVNEIVLKVNYILESRASTARADYFAQKQRKLNRRTSFSFQKEKKSGQQ

SEQ ID NO: 28095 - protein, 13 aa, Artificial Sequence
  Synthetic polypeptide
GQEFKQPRHLRVM

SEQ ID NO: 28096 - protein, 13 aa, Artificial Sequence
  Synthetic polypeptide
GQEFKQPRHLRVM

SEQ ID NO: 28097 - protein, 13 aa, Artificial Sequence
  Synthetic polypeptide
GQEFKQPRHLRVM

SEQ ID NO: 28098 - protein, 13 aa, Artificial Sequence
  Synthetic polypeptide
GQEFKQPRHLRVM

SEQ ID NO: 28099 - protein, 13 aa, Artificial Sequence
  Synthetic polypeptide
GQEFKQPRHLRVM

SEQ ID NO: 28100 - protein, 13 aa, Artificial Sequence
  Synthetic polypeptide
GQEFKQPRHLRVM

SEQ ID NO: 28101 - protein, 389 aa, Artificial Sequence
  Synthetic polypeptide
GQARWLTPVIPALGRPRQPDHLRSGVQAATSPEGHVGTTATKKIDVYLPLHSSQDRLLPMTVVTMASARVQDLIGLICWQYTSEGREPKLNDNVSAYCLHIAEDDGEVDTDFPPLDSNEPIHKFGFSTLALVEKYSSPGLTSKESLFVRINAAHGFSLIQVDNTKVTMKEILLKAVKRRKGSQKVSGPQYRLEKQSEPNVAVDLDSTLESQSAWEFCLVRENSSRADGVFEEDSQIDIATVQDMLSSHHYKSFKVSMIHRLRFTTDVQLGISGDKVEIDPVTNQKASTKFWIKQKPISIDSDLLCACDLAEEKSPSHAIFKLTYLSNHDYKHLYFESDAATVNEIVLKVNYILESRASTARADYFAQKQRKLNRRTSFSFQKEKKSGQQ

SEQ ID NO: 28102 - protein, 389 aa, Artificial Sequence; identical to SEQ ID NO: 28101
  Synthetic polypeptide

SEQ ID NO: 28103 - protein, 353 aa, Artificial Sequence
  Synthetic polypeptide
GQARWLTPVIPALGRPRQPDHLRSGVQAATSPEGHVGTTATKKIDVYLPLHSSQDRLLPMTVVTMASARVQDLIGLICWQYTSEGREPKLNDNVSAYCLHIAEDDGEVDTDFPPLDSNEPIHKFGFSTLALVEKYSSPGLTSKESLFVRINAAHGFSLIQVDNTKVTMKEILLKAVKRRKGSQKVSGSRADGVFEEDSQIDIATVQDMLSSHHYKSFKVSMIHRLRFTTDVQLGISGDKVEIDPVTNQKASTKFWIKQKPISIDSDLLCACDLAEEKSPSHAIFKLTYLSNHDYKHLYFESDAATVNEIVLKVNYILESRASTARADYFAQKQRKLNRRTSFSFQKEKKSGQQ

SEQ ID NO: 28104 - protein, 190 aa, Artificial Sequence
  Synthetic polypeptide
GQARWLTPVIPALGRPRQPDHLRSGVQAATSPEGHVGTTATKKIDVYLPLHSSQDRLLPMTVVTMASARVQDLIGLICWQYTSEGREPKLNDNVSAYCLHIAEDDGEVDTDFPPLDSNEPIHKFGFSTLALVEKYSSPGLTSKESLFVRINAAHGFSLIQVDNTKVTMKEILLKAVKRRKGSQKVSGACD

SEQ ID NO: 28105 - protein, 99 aa, Artificial Sequence
  Synthetic polypeptide
GQARWLTPVIPALGRPRQPDHLRSGVQAATSPEGHVGTTATKKIDVYLPLHSSQDRLLPMTVVTMASARVQDLIGLICWQYTSEGREPKLNDNVSAYCL

SEQ ID NO: 28106 - protein, 26 aa, Artificial Sequence
  Synthetic polypeptide
MRRPGQASAFLGLSFFTCRWCLLPLP

SEQ ID NO: 28107 - protein, 26 aa, Artificial Sequence
  Synthetic polypeptide
MRRPGQASAFLGLSFFTCRWCLLPLP

SEQ ID NO: 28108 - protein, 44 aa, Artificial Sequence
  Synthetic polypeptide
CAAPAKPQPFWALASSRVGGAFCLCPDHQSPQGTTKRQKETEKH

SEQ ID NO: 28109 - protein, 44 aa, Artificial Sequence; identical to SEQ ID NO: 28108
  Synthetic polypeptide

SEQ ID NO: 28110 - protein, 19 aa, Artificial Sequence
  Synthetic polypeptide
MRRPGQASAFLGLSFFTCR

SEQ ID NO: 28111 - protein, 19 aa, Artificial Sequence
  Synthetic polypeptide
MRRPGQASAFLGLSFFTCR

SEQ ID NO: 28112 - protein, 164 aa, Artificial Sequence
  Synthetic polypeptide
CAAPAKPQPFWALASSRVGEVGATSALAPKIGPLGLSPKKVGDDIAKATGDWKGLRITVKLTIQNRQAQIEVVPSASALIIKALKEPPRDRKKQKNIKHSGNITFDEIVNIARQMRHRSLARELSGTIKEILGTAQSVGCNVDGRHPHDIIDDINSGAVECPAS

SEQ ID NO: 28113 - protein, 131 aa, Artificial Sequence
  Synthetic polypeptide
CAAPAKPQPFWALASSRVGEVGATSALAPKIGPLGLIEVVPSASALIIKALKEPPRDRKKQKNIKHSGNITFDEIVNIARQMRHRSLARELSGTIKEILGTAQSVGCNVDGRHPHDIIDDINSGAVECPAS

SEQ ID NO: 28114 - protein, 26 aa, Artificial Sequence
  Synthetic polypeptide
MRRPGQASAFLGLSFFTCSIPEVHRR

SEQ ID NO: 28115 - protein, 26 aa, Artificial Sequence
  Synthetic polypeptide
MRRPGQASAFLGLSFFTCSIPEVHRR

SEQ ID NO: 28116 - protein, 171 aa, Artificial Sequence
  Synthetic polypeptide
CAAPAKPQPFWALASSRVVYLRCTGGEVGATSALAPKIGPLGLSPKKVGDDIAKATGDWKGLRITVKLTIQNRQAQIEVVPSASALIIKALKEPPRDRKKQKNIKHSGNITFDEIVNIARQMRHRSLARELSGTIKEILGTAQSVGCNVDGRHPHDIIDDINSGAVECPAS

SEQ ID NO: 28117 - protein, 138 aa, Artificial Sequence
  Synthetic polypeptide
CAAPAKPQPFWALASSRVVYLRCTGGEVGATSALAPKIGPLGLIEVVPSASALIIKALKEPPRDRKKQKNIKHSGNITFDEIVNIARQMRHRSLARELSGTIKEILGTAQSVGCNVDGRHPHDIIDDINSGAVECPAS

SEQ ID NO: 28118 - protein, 40 aa, Artificial Sequence
  Synthetic polypeptide
LTLIPSALLLALSLFSRHPRSIPWTLLTLSKASTVPTRLR

SEQ ID NO: 28119 - protein, 40 aa, Artificial Sequence; identical to SEQ ID NO: 28118
  Synthetic polypeptide

SEQ ID NO: 28120 - protein, 23 aa, Artificial Sequence
  Synthetic polypeptide
SLLLSSWPCHCSPGTLGLFLGLC

SEQ ID NO: 28121 - protein, 23 aa, Artificial Sequence
  Synthetic polypeptide
SLLLSSWPCHCSPGTLGLFLGLC

SEQ ID NO: 28122 - protein, 44 aa, Artificial Sequence
  Synthetic polypeptide
GRLGEGRDMEGLGVYVFILASLCDWNNKVSLPSLCSNLKVPWQC

SEQ ID NO: 28123 - protein, 44 aa, Artificial Sequence; identical to SEQ ID NO: 28122
  Synthetic polypeptide

SEQ ID NO: 28124 - protein, 44 aa, Artificial Sequence; identical to SEQ ID NO: 28122
  Synthetic polypeptide

SEQ ID NO: 28125 - protein, 44 aa, Artificial Sequence; identical to SEQ ID NO: 28122
  Synthetic polypeptide

SEQ ID NO: 28126 - protein, 44 aa, Artificial Sequence; identical to SEQ ID NO: 28122
  Synthetic polypeptide

SEQ ID NO: 28127 - protein, 44 aa, Artificial Sequence; identical to SEQ ID NO: 28122
  Synthetic polypeptide

SEQ ID NO: 28128 - protein, 44 aa, Artificial Sequence; identical to SEQ ID NO: 28122
  Synthetic polypeptide

SEQ ID NO: 28129 - protein, 37 aa, Artificial Sequence
  Synthetic polypeptide
ADWGKGETWKAWESTFSSWLHCVTGTTRCPCLHCAPT

SEQ ID NO: 28130 - protein, 37 aa, Artificial Sequence; identical to SEQ ID NO: 28129
  Synthetic polypeptide

SEQ ID NO: 28131 - protein, 37 aa, Artificial Sequence; identical to SEQ ID NO: 28129
  Synthetic polypeptide

SEQ ID NO: 28132 - protein, 37 aa, Artificial Sequence; identical to SEQ ID NO: 28129
  Synthetic polypeptide

SEQ ID NO: 28133 - protein, 37 aa, Artificial Sequence; identical to SEQ ID NO: 28129
  Synthetic polypeptide

SEQ ID NO: 28134 - protein, 37 aa, Artificial Sequence; identical to SEQ ID NO: 28129
  Synthetic polypeptide

SEQ ID NO: 28135 - protein, 37 aa, Artificial Sequence; identical to SEQ ID NO: 28129
  Synthetic polypeptide

SEQ ID NO: 28136 - protein, 342 aa, Artificial Sequence
  Synthetic polypeptide
LEQQGVPAFTVLQPEGPLAVLRDRAQQISCPLYLCPMLEALEEGGPPLTLGLEGEHQRSNAALALQLAHCWLQRQDRHGAGEPKASRPGLLWQLPLAPVFQPTSHMRLGLRNTEWPGRTQVLRRGPLTWYLDGAHTASSAQACVRWFRQALQGRERPSGGPEVRVLLFNATGDRDPAALLKLLQPCQFDYAVFCPNLTEVSSTGNADQQNFTVTLDQVLLRCLEHQQHWNHLDEEQASPDLWSAPSPEPGGSASLLLAPHPPHTCSASSLVFSCISHALQWISQGRDPIFQPPSPPKGLLTHPVAHSGASILREAAAIHVLVTGSLHLVGGVLKLLEPALSQ

SEQ ID NO: 28137 - protein, 342 aa, Artificial Sequence; identical to SEQ ID NO: 28136
  Synthetic polypeptide

SEQ ID NO: 28138 - protein, 342 aa, Artificial Sequence; identical to SEQ ID NO: 28136
  Synthetic polypeptide

SEQ ID NO: 28139 - protein, 130 aa, Artificial Sequence
  Synthetic polypeptide
LEQQGVPAFTVLQPEGPLAVLRDRAQQISVLGSQRHPGQGSCGSCPWHLCSSPHPTCGSGFGTRSGRAGRRCCGAGPSPGTWTVRTPPAARRPACAGSARRCRAARGRAVAPRFESCSSMLPGTGTRRPC

SEQ ID NO: 28140 - protein, 130 aa, Artificial Sequence; identical to SEQ ID NO: 28139
  Synthetic polypeptide

SEQ ID NO: 28141 - protein, 69 aa, Artificial Sequence
  Synthetic polypeptide
LEQQGVPAFTVLQPEGPLAVLRDRAQQISVLGSQRHPGQGSCGSCPWHLCSSPHPTCGSGFGTRSGRAG

SEQ ID NO: 28142 - protein, 25 aa, Artificial Sequence
  Synthetic polypeptide
LEQQGVPAFTVLQPEGPLAVLRDRA

SEQ ID NO: 28143 - protein, 333 aa, Artificial Sequence
  Synthetic polypeptide
GWAWWLTPIILALWETEASELPELRSSRPALAIRQNPVSTTDTKKINQLGFADLNLAEFAGSGSTVRCCLLEGYDTKNTRQDNSILKVTIGMFLLSGDPCFKTPPSTAKSISIPGQDSSLQLTCKGGGTSSGGSSTNSLTGSRPPKARPTILSSGLPEEPDQNLSSPEEVFHSGHSRNSSYASQQSKISGYSTEHSRSSSLSDLTHRRNTSTSSSASGGLGMTVEGPEGSEREHRPPEKPPRPPRPLHLSDRSFRRKKDSVESHPTWVDDTRIDADAIVEKIVQSQDFTDGSNTEDSNLRLFVSRDGSATLSGIQLATRVSSGVYEPVVIESH

SEQ ID NO: 28144 - protein, 44 aa, Artificial Sequence
  Synthetic polypeptide
SWHFGRLRQANCLSSGVQDQLWQYDKTPSLLQIQKKLTSWASLT

SEQ ID NO: 28145 - protein, 5 aa, Artificial Sequence
  Synthetic polypeptide
PAGLR

SEQ ID NO: 28146 - protein, 31 aa, Artificial Sequence
  Synthetic polypeptide
SPFCSYLWWASGRRYRRTVCGGERGSPSCVR

SEQ ID NO: 28147 - protein, 37 aa, Artificial Sequence
  Synthetic polypeptide
QSPTAWVNPHSALTCGGPQGGGTGELCAVAKEVHLRV

SEQ ID NO: 28148 - protein, 354 aa, Artificial Sequence
  Synthetic polypeptide
RVQLLGLIPILLLPVVGLREEVQENCVRWRKRFTFVCKMSANPATGLLDPCVFRVSVRKELKGGKAYSKLGFADLNLAEFAGSGSTVRCCLLEGYDTKNTRQDNSILKVTIGMFLLSGDPCFKTPPSTAKSISIPGQDSSLQLTCKGGGTSSGGSSTNSLTGSRPPKARPTILSSGLPEEPDQNLSSPEEVFHSGHSRNSSYASQQSKISGYSTEHSRSSSLSDLTHRRNTSTSSSASGGLGMTVEGPEGSEREHRPPEKPPRPPRPLHLSDRSFRRKKDSVESHPTWVDDTRIDADAIVEKIVQSQDFTDGSNTEDSNLRLFVSRDGSATLSGIQLATRVSSGVYEPVVIESH

SEQ ID NO: 28149 - protein, 338 aa, Artificial Sequence
  Synthetic polypeptide
PTREEVQENCVRWRKRFTFVCKMSANPATGLLDPCVFRVSVRKELKGGKAYSKLGFADLNLAEFAGSGSTVRCCLLEGYDTKNTRQDNSILKVTIGMFLLSGDPCFKTPPSTAKSISIPGQDSSLQLTCKGGGTSSGGSSTNSLTGSRPPKARPTILSSGLPEEPDQNLSSPEEVFHSGHSRNSSYASQQSKISGYSTEHSRSSSLSDLTHRRNTSTSSSASGGLGMTVEGPEGSEREHRPPEKPPRPPRPLHLSDRSFRRKKDSVESHPTWVDDTRIDADAIVEKIVQSQDFTDGSNTEDSNLRLFVSRDGSATLSGIQLATRVSSGVYEPVVIESH

SEQ ID NO: 28150 - protein, 44 aa, Artificial Sequence
  Synthetic polypeptide
SQHFGRPRQEDHLRSRVQDQPDQQGRRYRRTVCGGERGSPSCVR

SEQ ID NO: 28151 - protein, 29 aa, Artificial Sequence
  Synthetic polypeptide
GQEFKTSLTNKGGGTGELCAVAKEVHLRV

SEQ ID NO: 28152 - protein, 51 aa, Artificial Sequence
  Synthetic polypeptide
EAGPCLPQQQHGHRWWLHSDDSRRRGQVTLAGQWHQRPQNCPRISHQIHGL

SEQ ID NO: 28153 - protein, 51 aa, Artificial Sequence; identical to SEQ ID NO: 28152
  Synthetic polypeptide

SEQ ID NO: 28154 - protein, 51 aa, Artificial Sequence; identical to SEQ ID NO: 28152
  Synthetic polypeptide

SEQ ID NO: 28155 - protein, 51 aa, Artificial Sequence; identical to SEQ ID NO: 28152
  Synthetic polypeptide

SEQ ID NO: 28156 - protein, 51 aa, Artificial Sequence; identical to SEQ ID NO: 28152
  Synthetic polypeptide

SEQ ID NO: 28157 - protein, 51 aa, Artificial Sequence; identical to SEQ ID NO: 28152
  Synthetic polypeptide

SEQ ID NO: 28158 - protein, 256 aa, Artificial Sequence
  Synthetic polypeptide
KQVHASRSNNMGIVGGFTQMIREGGARSLWRGNGINVLKIAPESAIKFMAYEQIKRLVGSDQETLRIHERLVAGSLAGAIAQSSIYPMEVLKTRMALRKTGQYSGMLDCARRILAREGVAAFYKGYVPNMLGIIPYAGIDLAVYETLKNAWLQHYAVNSADPGVFVLLACGTMSSTCGQLASYPLALVRTRMQAQASIEGAPEVTMSSLFKHILRTEGAFGLYRGLAPNFMKVIPAVSISYVVYENLKITLGVQSR

SEQ ID NO: 28159 - protein, 256 aa, Artificial Sequence; identical to SEQ ID NO: 28158
  Synthetic polypeptide

SEQ ID NO: 28160 - protein, 256 aa, Artificial Sequence; identical to SEQ ID NO: 28158
  Synthetic polypeptide

SEQ ID NO: 28161 - protein, 256 aa, Artificial Sequence; identical to SEQ ID NO: 28158
  Synthetic polypeptide

SEQ ID NO: 28162 - protein, 256 aa, Artificial Sequence; identical to SEQ ID NO: 28158
  Synthetic polypeptide

SEQ ID NO: 28163 - protein, 256 aa, Artificial Sequence; identical to SEQ ID NO: 28158
  Synthetic polypeptide

SEQ ID NO: 28164 - protein, 19 aa, Artificial Sequence
  Synthetic polypeptide
SRSMPPAATTWASLVASLR

SEQ ID NO: 28165 - protein, 19 aa, Artificial Sequence
  Synthetic polypeptide
SRSMPPAATTWASLVASLR

SEQ ID NO: 28166 - protein, 19 aa, Artificial Sequence
  Synthetic polypeptide
SRSMPPAATTWASLVASLR

SEQ ID NO: 28167 - protein, 19 aa, Artificial Sequence
  Synthetic polypeptide
SRSMPPAATTWASLVASLR

SEQ ID NO: 28168 - protein, 19 aa, Artificial Sequence
  Synthetic polypeptide
SRSMPPAATTWASLVASLR

SEQ ID NO: 28169 - protein, 19 aa, Artificial Sequence
  Synthetic polypeptide
SRSMPPAATTWASLVASLR

SEQ ID NO: 28170 - protein, 41 aa, Artificial Sequence
  Synthetic polypeptide
LQVPKVTFCQSTSNFSHSCCGLSGQLRASWCNMAPPKEKEV

SEQ ID NO: 28171 - protein, 41 aa, Artificial Sequence; identical to SEQ ID NO: 28170
  Synthetic polypeptide

SEQ ID NO: 28172 - protein, 41 aa, Artificial Sequence; identical to SEQ ID NO: 28170
  Synthetic polypeptide

SEQ ID NO: 28173 - protein, 41 aa, Artificial Sequence; identical to SEQ ID NO: 28170
  Synthetic polypeptide

SEQ ID NO: 28174 - protein, 143 aa, Artificial Sequence
  Synthetic polypeptide
FRCQKSLSASPPPTSATAAVDSLDSSEPPGATWPRPRKKKCDYWIRTFVPGCQPGEFTLGNIKSYPGLTSYLVRVVSTNYNQHAMVFFKKVSQNREYFKITLYGRTKELTSELKENFIRFSKSLGLPENHIVFPVPIDQCIDG

SEQ ID NO: 28175 - protein, 143 aa, Artificial Sequence; identical to SEQ ID NO: 28174
  Synthetic polypeptide

SEQ ID NO: 28176 - protein, 143 aa, Artificial Sequence; identical to SEQ ID NO: 28174
  Synthetic polypeptide

SEQ ID NO: 28177 - protein, 67 aa, Artificial Sequence
  Synthetic polypeptide
SGAKSHFLPVHLQLQPQLLWTLWTAQSLLVQHGPAQGKRSVTTGSGLLFQVASPASSRWATLRVTLD

SEQ ID NO: 28178 - protein, 67 aa, Artificial Sequence; identical to SEQ ID NO: 28177
  Synthetic polypeptide

SEQ ID NO: 28179 - protein, 67 aa, Artificial Sequence; identical to SEQ ID NO: 28177
  Synthetic polypeptide

SEQ ID NO: 28180 - protein, 67 aa, Artificial Sequence; identical to SEQ ID NO: 28177
  Synthetic polypeptide

SEQ ID NO: 28181 - protein, 143 aa, Artificial Sequence
  Synthetic polypeptide
FRCQKSLSASPPPTSATAAVDSLDSSEPPGATWPRPRKKKCDYWIRTFVPGCQPGEFTLGNIKSYPGLTSYLVRVVSTNYNQHAMVFFKKVSQNREYFKITLYGRTKELTSELKENFIRFSKSLGLPENHIVFPVPIGNGQSG

SEQ ID NO: 28182 - protein, 61 aa, Artificial Sequence
  Synthetic polypeptide
SQHFEYAAINSMLDQINSCLDHLEEKNDHLHARLQELLESNRQTRLEFQQQLGEAPSDASP

SEQ ID NO: 28183 - protein, 70 aa, Artificial Sequence
  Synthetic polypeptide
MGPVARACNPSILNTLPSTPCWTRSTPVWTTWRRRMTTSTPASRSCWSPTGRHAWSSSSSSGRPPVMPAP

SEQ ID NO: 28184 - protein, 73 aa, Artificial Sequence
  Synthetic polypeptide
AEAGGWLELRSSRAAWNTLPSTPCWTRSTPVWTTWRRRMTTSTPASRSCWSPTGRHAWSSSSSSGRPPVMPAP

SEQ ID NO: 28185 - protein, 44 aa, Artificial Sequence
  Synthetic polypeptide
SQHFGRLRRVDGSSSGVREQPGIRCHQLHAGPDQLLSGPPGGEE

SEQ ID NO: 28186 - protein, 71 aa, Artificial Sequence
  Synthetic polypeptide
GGWMARAQEFESSLEYAAINSMLDQINSCLDHLEEKNDHLHARLQELLESNRQTRLEFQQQLGEAPSDASP

SEQ ID NO: 28187 - protein, 107 aa, Artificial Sequence
  Synthetic polypeptide
AEAGGWLELRSSRAAWVTWRNPSPPPPPVSKKYNSQRGAAVCSPSYSGGSEYAAINSMLDQINSCLDHLEEKNDHLHARLQELLESNRQTRLEFQQQLGEAPSDASP

SEQ ID NO: 28188 - protein, 90 aa, Artificial Sequence
  Synthetic polypeptide
HGETPPPPPPPSPKNTIASVVQPSVVPATLEAQNTLPSTPCWTRSTPVWTTWRRRMTTSTPASRSCWSPTGRHAWSSSSSSGRPPVMPAP

SEQ ID NO: 28189 - protein, 30 aa, Artificial Sequence
  Synthetic polypeptide
SQLLWRLRIRCHQLHAGPDQLLSGPPGGEE

SEQ ID NO: 28190 - protein, 63 aa, Artificial Sequence
  Synthetic polypeptide
KGTTCWEYAAINSMLDQINSCLDHLEEKNDHLHARLQELLESNRQTRLEFQQQLGEAPSDASP

SEQ ID NO: 28191 - protein, 63 aa, Artificial Sequence
  Synthetic polypeptide
KVQLAGNTLPSTPCWTRSTPVWTTWRRRMTTSTPASRSCWSPTGRHAWSSSSSSGRPPVMPAP

SEQ ID NO: 28192 - protein, 28 aa, Artificial Sequence
  Synthetic polypeptide
RYNLLGIRCHQLHAGPDQLLSGPPGGEE

SEQ ID NO: 28193 - protein, 168 aa, Artificial Sequence
  Synthetic polypeptide
QGVSRGLMVKSVNYGLDLQGSLPSSSTNQLCNPRQVRSRDISREEWKGSETYSPNTAYGVDFLVPVMGYICRICHKFYHSNSGAQLSHCKSLGHFENLQKYKAAKNPSPTTRPVSRRCAINARNALTALFTSSGRPPSQPNTQDKTPSKVTARPSQPPLPRRSTRLKT

SEQ ID NO: 28194 - protein, 168 aa, Artificial Sequence; identical to SEQ ID NO: 28193
  Synthetic polypeptide

SEQ ID NO: 28195 - protein, 168 aa, Artificial Sequence; identical to SEQ ID NO: 28193
  Synthetic polypeptide

SEQ ID NO: 28196 - protein, 168 aa, Artificial Sequence; identical to SEQ ID NO: 28193
  Synthetic polypeptide

SEQ ID NO: 28197 - protein, 168 aa, Artificial Sequence; identical to SEQ ID NO: 28193
  Synthetic polypeptide

SEQ ID NO: 28198 - protein, 168 aa, Artificial Sequence; identical to SEQ ID NO: 28193
  Synthetic polypeptide

SEQ ID NO: 28199 - protein, 168 aa, Artificial Sequence; identical to SEQ ID NO: 28193
  Synthetic polypeptide

SEQ ID NO: 28200 - protein, 168 aa, Artificial Sequence; identical to SEQ ID NO: 28193
  Synthetic polypeptide

SEQ ID NO: 28201 - protein, 168 aa, Artificial Sequence; identical to SEQ ID NO: 28193
  Synthetic polypeptide

SEQ ID NO: 28202 - protein, 168 aa, Artificial Sequence; identical to SEQ ID NO: 28193
  Synthetic polypeptide

SEQ ID NO: 28203 - protein, 19 aa, Artificial Sequence
  Synthetic polypeptide
TYRVPCPAPPQTSCATLDK

SEQ ID NO: 28204 - protein, 19 aa, Artificial Sequence
  Synthetic polypeptide
TYRVPCPAPPQTSCATLDK

SEQ ID NO: 28205 - protein, 19 aa, Artificial Sequence
  Synthetic polypeptide
TYRVPCPAPPQTSCATLDK

SEQ ID NO: 28206 - protein, 19 aa, Artificial Sequence
  Synthetic polypeptide
TYRVPCPAPPQTSCATLDK

SEQ ID NO: 28207 - protein, 19 aa, Artificial Sequence
  Synthetic polypeptide
TYRVPCPAPPQTSCATLDK

SEQ ID NO: 28208 - protein, 19 aa, Artificial Sequence
  Synthetic polypeptide
TYRVPCPAPPQTSCATLDK

SEQ ID NO: 28209 - protein, 19 aa, Artificial Sequence
  Synthetic polypeptide
TYRVPCPAPPQTSCATLDK

SEQ ID NO: 28210 - protein, 19 aa, Artificial Sequence
  Synthetic polypeptide
TYRVPCPAPPQTSCATLDK

SEQ ID NO: 28211 - protein, 19 aa, Artificial Sequence
  Synthetic polypeptide
TYRVPCPAPPQTSCATLDK

SEQ ID NO: 28212 - protein, 19 aa, Artificial Sequence
  Synthetic polypeptide
TYRVPCPAPPQTSCATLDK

SEQ ID NO: 28213 - protein, 61 aa, Artificial Sequence
  Synthetic polypeptide
TSEVQRYIQRGVEGLGDLQPQYCIWCGLPGARDGLYLPHLPQVLSQQLRGTALPLQVPGPL

SEQ ID NO: 28214 - protein, 61 aa, Artificial Sequence; identical to SEQ ID NO: 28213
  Synthetic polypeptide

SEQ ID NO: 28215 - protein, 61 aa, Artificial Sequence; identical to SEQ ID NO: 28213
  Synthetic polypeptide

SEQ ID NO: 28216 - protein, 61 aa, Artificial Sequence; identical to SEQ ID NO: 28213
  Synthetic polypeptide

SEQ ID NO: 28217 - protein, 61 aa, Artificial Sequence; identical to SEQ ID NO: 28213
  Synthetic polypeptide

SEQ ID NO: 28218 - protein, 61 aa, Artificial Sequence; identical to SEQ ID NO: 28213
  Synthetic polypeptide

SEQ ID NO: 28219 - protein, 61 aa, Artificial Sequence; identical to SEQ ID NO: 28213
  Synthetic polypeptide

SEQ ID NO: 28220 - protein, 61 aa, Artificial Sequence; identical to SEQ ID NO: 28213
  Synthetic polypeptide

SEQ ID NO: 28221 - protein, 61 aa, Artificial Sequence; identical to SEQ ID NO: 28213
  Synthetic polypeptide

SEQ ID NO: 28222 - protein, 61 aa, Artificial Sequence; identical to SEQ ID NO: 28213
  Synthetic polypeptide

SEQ ID NO: 28223 - protein, 14 aa, Artificial Sequence
  Synthetic polypeptide
VPEAVVSLSSARAG

SEQ ID NO: 28224 - protein, 14 aa, Artificial Sequence
  Synthetic polypeptide
VPEAVVSLSSARAG

SEQ ID NO: 28225 - protein, 14 aa, Artificial Sequence
  Synthetic polypeptide
VPEAVVSLSSARAG

SEQ ID NO: 28226 - protein, 14 aa, Artificial Sequence
  Synthetic polypeptide
VPEAVVSLSSARAG

SEQ ID NO: 28227 - protein, 14 aa, Artificial Sequence
  Synthetic polypeptide
VPEAVVSLSSARAG

SEQ ID NO: 28228 - protein, 12 aa, Artificial Sequence
  Synthetic polypeptide
FLCHPQGLADYQ

SEQ ID NO: 28229 - protein, 12 aa, Artificial Sequence
  Synthetic polypeptide
FLCHPQGLADYQ

SEQ ID NO: 28230 - protein, 12 aa, Artificial Sequence
  Synthetic polypeptide
FLCHPQGLADYQ

SEQ ID NO: 28231 - protein, 12 aa, Artificial Sequence
  Synthetic polypeptide
FLCHPQGLADYQ

SEQ ID NO: 28232 - protein, 12 aa, Artificial Sequence
  Synthetic polypeptide
FLCHPQGLADYQ

SEQ ID NO: 28233 - protein, 350 aa, Artificial Sequence
  Synthetic polypeptide
ARGSSAFLSIGSRGRSFFVIRKGWLTINNIGIMKGGSKEYWFVLTAENLSWYKDDEEKEKKYMLSVDNLKLRDVEKGFMSSKHIFALFNTEQRNVYKDYRQLELACETQEEVDSWKASFLRAGVYPERVGDKEKASETEENGSDSFMHSMDPQLERQVETIRNLVDSYMAIVNKTVRDLMPKTIMHLMINNTKEFIFSELLANLYSCGDQNTLMEESAEQAQRRDEMLRMYHALKEALSIIGDINTTTVSTPMPPPVDDSWLQVQSVPAGRRSPTSSPTPQRRAPAVPPARPGSRGPAPGPPPAGSALGGAPPVPSRPGASPDPFGPPPQVPSRPNRAPPGVPRITISDP

SEQ ID NO: 28234 - protein, 350 aa, Artificial Sequence; identical to SEQ ID NO: 28233
  Synthetic polypeptide

SEQ ID NO: 28235 - protein, 350 aa, Artificial Sequence; identical to SEQ ID NO: 28233
  Synthetic polypeptide

SEQ ID NO: 28236 - protein, 363 aa, Artificial Sequence
  Synthetic polypeptide
ARGSSAFLSIGSRGRSFFVIRKGWLTINNIGIMKGGSKEYWFVLTAENLSWYKDDEEKEKKYMLSVDNLKLRDVEKGFMSSKHIFALFNTEQRNVYKDYRQLELACETQEEVDSWKASFLRAGVYPERVGDKEKASETEENGSDSFMHSMDPQLERQVETIRNLVDSYMAIVNKTVRDLMPKTIMHLMINNTKEFIFSELLANLYSCGDQNTLMEESAEQAQRRDEMLRMYHALKEALSIIGDINTTTVSTPMPPPVDDSWLQVQSVPAGRRSPTSSPTPQRRAPAVPPARPGSRGPAPGPPPAGSALGGAPPVPSRPGASPDPFGPPPQVPSRPNRAPPGVPSRSGQASPSRPESPRPPFDL

SEQ ID NO: 28237 - protein, 363 aa, Artificial Sequence; identical to SEQ ID NO: 28236
  Synthetic polypeptide

SEQ ID NO: 28238 - protein, 351 aa, Artificial Sequence
  Synthetic polypeptide
QSRTPSQKKKKGVSVHVCNEHRYGYMNVPVKSHQGLEDERVNFIHLILEALVDGPRMQASAHVTRPSKRPSKIGFDEVFVISLARRPDRRERMLASLWEMEISGRVVDAVDGWMLNSSAIRNLGVDLLPGYQDPYSGRTLTKGEVGCFLSHYSIWEEVVARGLARVLVFEDDVRFESNFRGRLERLMEDVEAEKLSWDLIYLGRKQVNPEKETAVEGLPGLVVAGYSYWTLAYALRLAGARKLLASQPLRRMLPVDEFLPIMFDQHPNEQYKAHFWPRDLVAFSAQPLLAAPTHYAGDAEWLSDTETSSPWDDDSGRLISWSGSQKTLRSPRLDLTGSSGHSLQPQPRDEL

SEQ ID NO: 28239 - protein, 351 aa, Artificial Sequence; identical to SEQ ID NO: 28238
  Synthetic polypeptide

SEQ ID NO: 28240 - protein, 37 aa, Artificial Sequence
  Synthetic polypeptide
AKIAPLHSSLGDRAGLHLKKKKKGSPSTCAMSTVMGT

SEQ ID NO: 28241 - protein, 37 aa, Artificial Sequence; identical to SEQ ID NO: 28240
  Synthetic polypeptide

SEQ ID NO: 28242 - protein, 37 aa, Artificial Sequence; identical to SEQ ID NO: 28240
  Synthetic polypeptide

SEQ ID NO: 28243 - protein, 106 aa, Artificial Sequence
  Synthetic polypeptide
PGAVAHACNPSTLDGLGWVDHFRPGVRDHPGQHGETPSLLKIQKLAGCGGAHLYSQLLRRLRQENCSNLGDRGCNEPRSHHCTPASVTEQDSISKKKKRGLRPRVQ

SEQ ID NO: 28244 - protein, 106 aa, Artificial Sequence; identical to SEQ ID NO: 28243
  Synthetic polypeptide

SEQ ID NO: 28245 - protein, 106 aa, Artificial Sequence; identical to SEQ ID NO: 28243
  Synthetic polypeptide

SEQ ID NO: 28246 - protein, 52 aa, Artificial Sequence
  Synthetic polypeptide
QSRTPSQKKKKGVSVHVCNEHRYGYMNVPVKSHQGLEDERVNFIHLILEALG

SEQ ID NO: 28247 - protein, 45 aa, Artificial Sequence
  Synthetic polypeptide
SQLLVRLRQENHLNLGGRGRGGLLPQPLLHLGRGGCQGPGPGPGV

SEQ ID NO: 28248 - protein, 45 aa, Artificial Sequence; identical to SEQ ID NO: 28247
  Synthetic polypeptide

SEQ ID NO: 28249 - protein, 214 aa, Artificial Sequence
  Synthetic polypeptide
TWEVEGEVGCFLSHYSIWEEVVARGLARVLVFEDDVRFESNFRGRLERLMEDVEAEKLSWDLIYLGRKQVNPEKETAVEGLPGLVVAGYSYWTLAYALRLAGARKLLASQPLRRMLPVDEFLPIMFDQHPNEQYKAHFWPRDLVAFSAQPLLAAPTHYAGDAEWLSDTETSSPWDDDSGRLISWSGSQKTLRSPRLDLTGSSGHSLQPQPRDEL

SEQ ID NO: 28250 - protein, 214 aa, Artificial Sequence; identical to SEQ ID NO: 28249
  Synthetic polypeptide

SEQ ID NO: 28251 - protein, 41 aa, Artificial Sequence
  Synthetic polypeptide
ARHSSSCLSSQHFGRPRQADHLRCLVCIPWATRQPKRRVCM

SEQ ID NO: 28252 - protein, 41 aa, Artificial Sequence; identical to SEQ ID NO: 28251
  Synthetic polypeptide

SEQ ID NO: 28253 - protein, 413 aa, Artificial Sequence
  Synthetic polypeptide
QAQQLMPVISALWETEAGGSPEVSCLYTLGYPPAQAQGLHVTSISWNSTGSVVACAYGRLDHGDWSTLKSFVCAWNLDRRDLRPQQPSAVVEVPSAVLCLAFHPTQPSHVAGGLYSGEVLVWDLSRLEDPLLWRTGLTDDTHTDPVSQVVWLPEPGHSHRFQVLSVATDGKVLLWQGIGVGQLQLTEGFALVMQQLPRSTKLKKHPRGETEVGATAVAFSSFDPRLFILGTEGGFPLKCSLAAGEAALTRMPSSVPLRAPAQFTFSPHGGPIYSVSCSPFHRNLFLSAGTDGHVHLYSMLQAPPLTSLQLSLKYLFAVRWSPVRPLVFAAASGKGDVQLFDLQKSSQKPTVLIKQTQDESPVYCLEFNSQQTQLLAAGDAQGTVKVWQLSTEFTEQGPREAEDLDCLAAEVAA

SEQ ID NO: 28254 - protein, 158 aa, Artificial Sequence
  Synthetic polypeptide
QAQQLMPVISALWETEAGGSPEVSCLYTLGYPPAQAQGLHVTSISWNSTGSVVACAYGRLDHGDWSTLKSFVCAWNLDRRDLRPQQPSAVVEVPSAVLCLAFHPTQPSHVAGELPAVSASSPLRTQLPALQRAQGSFPWALWPGDRKAGPDPLSLEPR

SEQ ID NO: 28255 - protein, 420 aa, Artificial Sequence
  Synthetic polypeptide
EVRRPSAWQLPRLRSAEPLRPAATPSEKIADFQDVLKEPSIALEKLRELSFSGIPCEGGLRCLCWKILLNYLPLERASWTSILAKQRELYAQFLREMIIQPGIAKANMGVSREDVTFEDHPLNPNPDSRWNTYFKDNEVLLQIDKDVRRLCPDISFFQRATDYPCLLILDPQNEFETLRKRVEQTTLKSQTVARNRSGVTNMSSPHKNSVPSSLNEYEVLPNGCEAHWEVVERILFIYAKLNPGIAYVQGMNEIVGPLYYTFATDPNSEWKEHAEADTFFCFTNLMAEIRDNFIKSLDDSQCGITYKMEKVYSTLKDKDVELYLKLQEQNIKPQFFAFRWLTLLLSQEFLLPDVIRIWDSLFADDNRFDFLLLVCCAMLMLIREQLLEGDFTVNMRLLQDYPITDVCQILQKAKELQDSK

SEQ ID NO: 28256 - protein, 22 aa, Artificial Sequence
  Synthetic polypeptide
EVRSPSARQPPRLRKLQISRMS

SEQ ID NO: 28257 - protein, 22 aa, Artificial Sequence
  Synthetic polypeptide
EVRSPSARQPPRLRKLQISRMS

SEQ ID NO: 28258 - protein, 24 aa, Artificial Sequence
  Synthetic polypeptide
ENCRFPGCPEGALNCIGKAAGTQL

SEQ ID NO: 28259 - protein, 24 aa, Artificial Sequence
  Synthetic polypeptide
ENCRFPGCPEGALNCIGKAAGTQL

SEQ ID NO: 28260 - protein, 295 aa, Artificial Sequence
  Synthetic polypeptide
EVRRPSAWQLPRLRSAEPLRPAATPSEKIADFQDVLKEPSIALEKLRELSFSGIPCEGGLRCLCWKILLNYLPLERASWTSILAKQRELYAQFLREMIIQPGIAKANMGVSREDVTFEDHPLNPNPDSRWNTYFKDNEVLLQIDKDVRRLCPDISFFQRATDYPCLLILDPQNEFETLRKRVEQTTLKSQTVARNRSGVTNQEQNIKPQFFAFRWLTLLLSQEFLLPDVIRIWDSLFADDNRFDFLLLVCCAMLMLIREQLLEGDFTVNMRLLQDYPITDVCQILQKAKELQDSK

SEQ ID NO: 28261 - protein, 28 aa, Artificial Sequence
  Synthetic polypeptide
NTENLGVESGSPFRVSCQDCPDTRGHPR

SEQ ID NO: 28262 - protein, 28 aa, Artificial Sequence
  Synthetic polypeptide
NTENLGVESGSPFRVSCQDCPDTRGHPR

SEQ ID NO: 28263 - protein, 28 aa, Artificial Sequence
  Synthetic polypeptide
NTENLGVESGSPFRVSCQDCPDTRGHPR

SEQ ID NO: 28264 - protein, 28 aa, Artificial Sequence
  Synthetic polypeptide
NTENLGVESGSPFRVSCQDCPDTRGHPR

SEQ ID NO: 28265 - protein, 28 aa, Artificial Sequence
  Synthetic polypeptide
NTENLGVESGSPFRVSCQDCPDTRGHPR

SEQ ID NO: 28266 - protein, 28 aa, Artificial Sequence
  Synthetic polypeptide
NTENLGVESGSPFRVSCQDCPDTRGHPR

SEQ ID NO: 28267 - protein, 28 aa, Artificial Sequence
  Synthetic polypeptide
NTENLGVESGSPFRVSCQDCPDTRGHPR

SEQ ID NO: 28268 - protein, 28 aa, Artificial Sequence
  Synthetic polypeptide
NTENLGVESGSPFRVSCQDCPDTRGHPR

SEQ ID NO: 28269 - protein, 28 aa, Artificial Sequence
  Synthetic polypeptide
NTENLGVESGSPFRVSCQDCPDTRGHPR

SEQ ID NO: 28270 - protein, 28 aa, Artificial Sequence
  Synthetic polypeptide
NTENLGVESGSPFRVSCQDCPDTRGHPR

SEQ ID NO: 28271 - protein, 28 aa, Artificial Sequence
  Synthetic polypeptide
NTENLGVESGSPFRVSCQDCPDTRGHPR

SEQ ID NO: 28272 - protein, 28 aa, Artificial Sequence
  Synthetic polypeptide
NTENLGVESGSPFRVSCQDCPDTRGHPR

SEQ ID NO: 28273 - protein, 28 aa, Artificial Sequence
  Synthetic polypeptide
NTENLGVESGSPFRVSCQDCPDTRGHPR

SEQ ID NO: 28274 - protein, 28 aa, Artificial Sequence
  Synthetic polypeptide
NTENLGVESGSPFRVSCQDCPDTRGHPR

SEQ ID NO: 28275 - protein, 28 aa, Artificial Sequence
  Synthetic polypeptide
NTENLGVESGSPFRVSCQDCPDTRGHPR

SEQ ID NO: 28276 - protein, 28 aa, Artificial Sequence
  Synthetic polypeptide
NTENLGVESGSPFRVSCQDCPDTRGHPR

SEQ ID NO: 28277 - protein, 28 aa, Artificial Sequence
  Synthetic polypeptide
NTENLGVESGSPFRVSCQDCPDTRGHPR

SEQ ID NO: 28278 - protein, 28 aa, Artificial Sequence
  Synthetic polypeptide
NTENLGVESGSPFRVSCQDCPDTRGHPR

SEQ ID NO: 28279 - protein, 28 aa, Artificial Sequence
  Synthetic polypeptide
NTENLGVESGSPFRVSCQDCPDTRGHPR

SEQ ID NO: 28280 - protein, 28 aa, Artificial Sequence
  Synthetic polypeptide
NTENLGVESGSPFRVSCQDCPDTRGHPR

SEQ ID NO: 28281 - protein, 65 aa, Artificial Sequence
  Synthetic polypeptide
GRLTKTPRTWEWNQAALSGSHAKTALIPVGILDEDWPICRALQPAVEHQRRPFLVQSEPGSHPHV

SEQ ID NO: 28282 - protein, 65 aa, Artificial Sequence; identical to SEQ ID NO: 28281
  Synthetic polypeptide

SEQ ID NO: 28283 - protein, 65 aa, Artificial Sequence; identical to SEQ ID NO: 28281
  Synthetic polypeptide

SEQ ID NO: 28284 - protein, 65 aa, Artificial Sequence; identical to SEQ ID NO: 28281
  Synthetic polypeptide

SEQ ID NO: 28285 - protein, 65 aa, Artificial Sequence; identical to SEQ ID NO: 28281
  Synthetic polypeptide

SEQ ID NO: 28286 - protein, 65 aa, Artificial Sequence; identical to SEQ ID NO: 28281
  Synthetic polypeptide

SEQ ID NO: 28287 - protein, 65 aa, Artificial Sequence; identical to SEQ ID NO: 28281
  Synthetic polypeptide

SEQ ID NO: 28288 - protein, 65 aa, Artificial Sequence; identical to SEQ ID NO: 28281
  Synthetic polypeptide

SEQ ID NO: 28289 - protein, 65 aa, Artificial Sequence; identical to SEQ ID NO: 28281
  Synthetic polypeptide

SEQ ID NO: 28290 - protein, 65 aa, Artificial Sequence; identical to SEQ ID NO: 28281
  Synthetic polypeptide

SEQ ID NO: 28291 - protein, 65 aa, Artificial Sequence; identical to SEQ ID NO: 28281
  Synthetic polypeptide

SEQ ID NO: 28292 - protein, 65 aa, Artificial Sequence; identical to SEQ ID NO: 28281
  Synthetic polypeptide

SEQ ID NO: 28293 - protein, 65 aa, Artificial Sequence; identical to SEQ ID NO: 28281
  Synthetic polypeptide

SEQ ID NO: 28294 - protein, 65 aa, Artificial Sequence; identical to SEQ ID NO: 28281
  Synthetic polypeptide

SEQ ID NO: 28295 - protein, 65 aa, Artificial Sequence; identical to SEQ ID NO: 28281
  Synthetic polypeptide

SEQ ID NO: 28296 - protein, 65 aa, Artificial Sequence; identical to SEQ ID NO: 28281
  Synthetic polypeptide

SEQ ID NO: 28297 - protein, 65 aa, Artificial Sequence; identical to SEQ ID NO: 28281
  Synthetic polypeptide

SEQ ID NO: 28298 - protein, 65 aa, Artificial Sequence; identical to SEQ ID NO: 28281
  Synthetic polypeptide

SEQ ID NO: 28299 - protein, 65 aa, Artificial Sequence; identical to SEQ ID NO: 28281
  Synthetic polypeptide

SEQ ID NO: 28300 - protein, 65 aa, Artificial Sequence; identical to SEQ ID NO: 28281
  Synthetic polypeptide

SEQ ID NO: 28301 - protein, 67 aa, Artificial Sequence
  Synthetic polypeptide
LKTFSWLLVQSPNSSGLCQPRGCPETRRPPVLQERPRRGTLPQGPPERHGDHLPLPFPGLRLLLSGS

SEQ ID NO: 28302 - protein, 117 aa, Artificial Sequence
  Synthetic polypeptide
CKVQILQAFANPEDALRHGGPQYCRSDPDVERCLRAHRNDMETIYPFLFLGFVYSFLGPNPFVAWMHFLVFLVGRVAHTVAYLGKLRAPIRSVTYTLAQLPCASMALQILWEAARHL

SEQ ID NO: 28303 - protein, 23 aa, Artificial Sequence
  Synthetic polypeptide
QDLLMAFSAKSKFFRPLPTPRMP

SEQ ID NO: 28304 - protein, 17 aa, Artificial Sequence
  Synthetic polypeptide
GESLLMNSRWLLAQQLN

SEQ ID NO: 28305 - protein, 85 aa, Artificial Sequence
  Synthetic polypeptide
TPGGFWHSSLIDRNLIDYFVPFLPLEYKHLKMCIRVEMQSRGYEIDEDIVSRVAEEMTFFPKEERVFSDKGCKTVFTKLDYYYDD

SEQ ID NO: 28306 - protein, 36 aa, Artificial Sequence
  Synthetic polypeptide
SITWELGRKKCRFSVPFRVMRGIFADELQVASGTAA

SEQ ID NO: 28307 - protein, 349 aa, Artificial Sequence
  Synthetic polypeptide
GRARWLTPVILALWEAEAGGSRDQEIETILANMPQKSRAEDLGLKAKALEKTVASWQHMATEAARTLQTAAQATLRQTEPLTKLHQEARAALTQASSSVQAATVTVMGARTLLADLEGMKLQFPRPKDQAALQRKADSVSDRLLADTRKKTKQAERMLGNAAPLSSSAKKKGREAEVLAKDSAKLAKALLRERKQAHRRASRLTSQTQATLQQASQQVLASEARRQELEEAERVGAGLSEMEQQIRESRISLEKDIETLSELLARLGSLDTHQAPAQALNETQWALERLRLQLGSPGSLQRKLSLLEQESQQQELQIQGFESDLAEIRADKQNLEAILHSLPENCASWQ

SEQ ID NO: 28308 - protein, 32 aa, Artificial Sequence
  Synthetic polypeptide
HFGRLRRADHEIRRSRPSWLTCLRSPGLKTWA

SEQ ID NO: 28309 - protein, 7 aa, Artificial Sequence
  Synthetic polypeptide
HASEVPG

SEQ ID NO: 28310 - protein, 188 aa, Artificial Sequence
  Synthetic polypeptide
GQVWWLTPVIPALWEAKAGRSLELAKALLRERKQAHRRASRLTSQTQATLQQASQQVLASEARRQELEEAERVGAGLSEMEQQIRESRISLEKDIETLSELLARLGSLDTHQAPAQALNETQWALERLRLQLGSPGSLQRKLSLLEQESQQQELQIQGFESDLAEIRADKQNLEAILHSLPENCASWQ

SEQ ID NO: 28311 - protein, 188 aa, Artificial Sequence; identical to SEQ ID NO: 28310
  Synthetic polypeptide

SEQ ID NO: 28312 - protein, 19 aa, Artificial Sequence
  Synthetic polypeptide
SQHFGRPRQADHLSLPRPC

SEQ ID NO: 28313 - protein, 19 aa, Artificial Sequence
  Synthetic polypeptide
SQHFGRPRQADHLSLPRPC

SEQ ID NO: 28314 - protein, 187 aa, Artificial Sequence
  Synthetic polypeptide
QALHSAMVPSPHPVSAEKSSSPSTCGQYLAPLKLTMPLPRYGSGQQPLILPQSIQLPPGQSLSVGAPRRIPPPGSQPPVLNTSREPSQMEMKGFHFADSKQNVPSGGPVPSPQTYRPSSASPSGKPSGSAVNMGSVQGHYVQQAKQRVDEKPSLGAVKLQEAPSAASQMKRTGAIKPRAVKVEESKA

SEQ ID NO: 28315 - protein, 187 aa, Artificial Sequence; identical to SEQ ID NO: 28314
  Synthetic polypeptide

SEQ ID NO: 28316 - protein, 187 aa, Artificial Sequence; identical to SEQ ID NO: 28314
  Synthetic polypeptide

SEQ ID NO: 28317 - protein, 82 aa, Artificial Sequence
  Synthetic polypeptide
EIFLSVNLWAVFGTFEADHATASVRLRAAATDPAPVYSAATWAEPLRWGPPKDSSARVPAASPEHQQRALSDGDERLPLCRQ

SEQ ID NO: 28318 - protein, 82 aa, Artificial Sequence; identical to SEQ ID NO: 28317
  Synthetic polypeptide

SEQ ID NO: 28319 - protein, 82 aa, Artificial Sequence; identical to SEQ ID NO: 28317
  Synthetic polypeptide

SEQ ID NO: 28320 - protein, 82 aa, Artificial Sequence; identical to SEQ ID NO: 28317
  Synthetic polypeptide

SEQ ID NO: 28321 - protein, 82 aa, Artificial Sequence; identical to SEQ ID NO: 28317
  Synthetic polypeptide

SEQ ID NO: 28322 - protein, 129 aa, Artificial Sequence
  Synthetic polypeptide
QALHSAMVPSPHPVSAEKSSSPSTCGQYLAPLKLTMPLPRYGSGQQPLILPQSIQLPPGQSLSVGAPRRIPPPGSQPPVLNTSREPSQMEMKGFHFADSKQNVPSGGPVPSPQTYRQNNEWMRNPAWEP

SEQ ID NO: 28323 - protein, 129 aa, Artificial Sequence; identical to SEQ ID NO: 28322
  Synthetic polypeptide

SEQ ID NO: 28324 - protein, 19 aa, Artificial Sequence
  Synthetic polypeptide
EEMNSTNSEPQGVFPECAI

SEQ ID NO: 28325 - protein, 113 aa, Artificial Sequence
  Synthetic polypeptide
IQPTVSPRVFFLNVPFDSIMERLTLRRIDPVTGERYHLMYKPPPTMEIQARLLQNPKDAEEQVKLKMDLFYRNSADLEQLYGSAITLNGDQDPYTVFEYIESGIINPLPKKIP

SEQ ID NO: 28326 - protein, 6 aa, Artificial Sequence
  Synthetic polypeptide
APGCFS

SEQ ID NO: 28327 - protein, 85 aa, Artificial Sequence
  Synthetic polypeptide
NGENRGLHPTSRLLEGPNETAPPCLQWTRLVCAVLHASRHPGVFQCLRDSPEHVGLADGTGRLRRTQEVNICDVRRPDHCCADLP

SEQ ID NO: 28328 - protein, 206 aa, Artificial Sequence
  Synthetic polypeptide
SLGLSLLFCKMGRTEASTPPPGCWKGPTRQLHHACNGPGLSVLCFMRHDILEYFSVYGTALSMWVSLMALADFDEPKRSTFVMFGVLTIAVRIYHDRWGYGVYSGPIGTAILIIAAKWLQKMKEKKGLYPDKSVYTQQIGPGLCFGALALMLRFFFEDWDYTYVHSFYHCALAMSFVLLLPKVNKKAGSPGTPAKLDCSTLCCACV

SEQ ID NO: 28329 - protein, 60 aa, Artificial Sequence
  Synthetic polypeptide
PWASVSSSVKWGEQRPPPHLPAAGRAQRDSSTMPAMDPACLCCASCVTTSWSISVSTGQP

SEQ ID NO: 28330 - protein, 483 aa, Artificial Sequence
  Synthetic polypeptide
VLGPWVGHLINLSLALLIGKKRGRVSTLDFDFSTQVNSSLTSPTGRGSMAAPSLHPSLGPGIGSPGQLHSPISTLSSPINGMGPPFSVISSPMGPHSMSVPTTPTLGFSTGSPQLSSPMNPVSSSEDIKPPLGLNGVLKVPAHPSGNMASFTKHICAICGDRSSGKHYGVYSCEGCKGFFKRTVRKDLTYTCRDNKDCLIDKRQRNRCQYCRYQKCLAMGMKREAVQEERQRGKDRNENEVESTSSANEDMPVERILEAELAVEPKTETYVEANMGLNPSSPNDPVTNICQAADKQLFTLVEWAKRIPHFSELPLDDQVILLRAGWNELLIASFSHRSIAVKDGILLATGLHVHRNSAHSAGVGAIFDRVLTELVSKMRDMQMDKTELGCLRAIVLFNPDSKGLSNPAEVEALREKVYASLEAYCKHKYPEQPGRFAKLLLRLPALRSIGLKCLEHLFFFKLIGDTPIDTFLMEMLEAPHQMT

SEQ ID NO: 28331 - protein, 29 aa, Artificial Sequence
  Synthetic polypeptide
VTSSTSALLSSLVKSGEEFLPWILISPPR

SEQ ID NO: 28332 - protein, 53 aa, Artificial Sequence
  Synthetic polypeptide
RHQHIVGSLSSCSACRLCAPSGSNAWNISSSSSSSGTHPLTPSLWRCWRRRTK

SEQ ID NO: 28333 - protein, 53 aa, Artificial Sequence; identical to SEQ ID NO: 28332
  Synthetic polypeptide

SEQ ID NO: 28334 - protein, 54 aa, Artificial Sequence
  Synthetic polypeptide
TPAHSRFAKLLLRLPALRSIGLKCLEHLFFFKLIGDTPIDTFLMEMLEAPHQMT

SEQ ID NO: 28335 - protein, 54 aa, Artificial Sequence; identical to SEQ ID NO: 28334
  Synthetic polypeptide

SEQ ID NO: 28336 - protein, 423 aa, Artificial Sequence
  Synthetic polypeptide
AEIAPLHSSLGYRGRLPGLRVRCIFLAWLGVFAGSWLVYVHYSSYSERCRGHVCQVVICDQYRKGIISGSVCQDLCELHMVEWRTCLSVAPGQQVYSGLWRDKDVTIKCGIEETLDSKARSDAAPRRELVLFDKPTRGTSIKEFREMTLSFLKANLGDLPSLPALVGQVLLMADFNKDNRVSLAEAKSVWALLQRNEFLLLLSLQEKEHASRLLGYCGDLYLTEGVPHGAWHAAALPPLLRPLLPPALQGALQQWLGPAWPWRAKIAIGLLEFVEELFHGSYGTFYMCETTLANVGYTATYDFKMADLQQVAPEATVRRFLQGRRCEHSTDCTYGRDCRAPCDRLMRQCKGDLIQPNLAKVCALLRGYLLPGAPADLREELGTQLRTCTTLSGLASQVEAHHSLVLSHLKTLLWKKISNTKYS

SEQ ID NO: 28337 - protein, 126 aa, Artificial Sequence
  Synthetic polypeptide
SQLLGRLTQENHLNPGGRGCSEPRSRHCTPAWATEAGSQASGSAASSWPGWASLQAAGWCTCTTRPTRSAVAAMSARWSFVTSTARGSSRAPSARTCVSCIWWSGGPASRWPRASRCTAGSGGTRM

SEQ ID NO: 28338 - protein, 67 aa, Artificial Sequence
  Synthetic polypeptide
TREAEVAVSRDRATALQPGLQRPAPRPQGPLHLPGLAGRLCRQLAGVRALLVLLGALSRPCLPGGHL

SEQ ID NO: 28339 - protein, 305 aa, Artificial Sequence
  Synthetic polypeptide
VGNVQFQDHVKTCGKCRVPCRFHAIGCLETVEGEKQQEHEVQWLREHLAMLLSSVLEAKPLLGDQSHAGSELLQRCESLEKKTATFENIVCVLNREVERVAMTAEACSRQHRLDQDKIEALSSKVQQLERSIGLKDLAMADLEQKVLEMEASTYDGVFIWKISDFARKRQEAVAGRIPAIFSPAFYTSRYGYKMCLRIYLNGDGTGRGTHLSLFFVVMKGPNDALLRWPFNQKVTLMLLDQNNREHVIDAFRPDVTSSSFQRPVNDMNIASGCPLFCPVSKMEAKNSYVRDDAIFIKAIVDLTGL

SEQ ID NO: 28340 - protein, 305 aa, Artificial Sequence; identical to SEQ ID NO: 28339
  Synthetic polypeptide

SEQ ID NO: 28341 - protein, 305 aa, Artificial Sequence; identical to SEQ ID NO: 28339
  Synthetic polypeptide

SEQ ID NO: 28342 - protein, 46 aa, Artificial Sequence
  Synthetic polypeptide
QSSVSGVHAVDPANRRLEMFSFRTTSRLVASVESLADSTPSAASRR

SEQ ID NO: 28343 - protein, 46 aa, Artificial Sequence; identical to SEQ ID NO: 28342
  Synthetic polypeptide

SEQ ID NO: 28344 - protein, 46 aa, Artificial Sequence; identical to SEQ ID NO: 28342
  Synthetic polypeptide

SEQ ID NO: 28345 - protein, 48 aa, Artificial Sequence
  Synthetic polypeptide
SPLYRGSTPWIQPTVGWKCSVSGPRQDLWQVSSPLQIPRHRLPRDGRG

SEQ ID NO: 28346 - protein, 48 aa, Artificial Sequence; identical to SEQ ID NO: 28345
  Synthetic polypeptide

SEQ ID NO: 28347 - protein, 48 aa, Artificial Sequence; identical to SEQ ID NO: 28345
  Synthetic polypeptide

SEQ ID NO: 28348 - protein, 471 aa, Artificial Sequence
  Synthetic polypeptide
NARRAPDPGFQERFFQQRLDHFNFERFGNKTFPQRFLVSDRFWVRGEGPIFFYTGNEGDVWAFANNSAFVAELAAERGALLVFAEHRYYGKSLPFGAQSTQRGHTELLTVEQALADFAELLRALRRDLGAQDAPAIAFGGSYGGMLSAYLRMKYPHLVAGALAASAPVLAVAGLGDSNQFFRDVTADFEGQSPKCTQGVREAFRQIKDLFLQGAYDTVRWEFGTCQPLSDEKDLTQLFMFARNAFTVLAMMDYPYPTDFLGPLPANPVKVGCDRLLSEAQRITGLRALAGLVYNASGSEHCYDIYRLYHSCADPTGCGTGPDARAWDYQACTEINLTFASNNVTDMFPDLPFTDELRQRYCLDTWGVWPRPDWLLTSFWGGDLRAASNIIFSNGNLDPWAGGGIRRNLSASVIAVTIQGGAHHLDLRASHPEDPASVVEARKLEATIIGEWVKAARREQQPALRGGPRLSL

SEQ ID NO: 28349 - protein, 122 aa, Artificial Sequence
  Synthetic polypeptide
YDVPGVSRATETDGRMPAGPRTPASRSASSSSVWTTSTSSASATRPSLSASWCRTGSGSGARGPSSSTLGTRATCGPSPTTRPSSRSWRPSGGLYWSSRSTATTGSRCRSVRSPRSAGTRSC

SEQ ID NO: 28350 - protein, 122 aa, Artificial Sequence; identical to SEQ ID NO: 28349
  Synthetic polypeptide

SEQ ID NO: 28351 - protein, 206 aa, Artificial Sequence
  Synthetic polypeptide
DSTDMTYLESAEPQRQMVECPQGPGPRLPGALLPAASGPLQLRALRQQDLPSALPGVGQVLGPGRGAHLLLHWERGRRVGLRQQLGLRRGAGGRAGGSTGLRGAPLLREVAAVRCAVHAARAHGAADGGAGPGRLRRAAPRATTRPRGPGCPRHRLRWKLWGDAQCLPEDEVSPPGGGGAGGQRARSSCGRPRRLQPVLPGRHGGL

SEQ ID NO: 28352 - protein, 106 aa, Artificial Sequence
  Synthetic polypeptide
NARRAPDPGFQERFFQQRLDHFNFERFGNKTFPQRFLVSGSGSGARGPSSSTLGTRATCGPSPTTRPSSRSWRPSGGLYWSSRSTATTGSRCRSVRSPRSAGTRSC

SEQ ID NO: 28353 - protein, 121 aa, Artificial Sequence
  Synthetic polypeptide
YDVPGVSRATETDGRMPAGPRTPASRSASSSSVWTTSTSSASATRPSLSASWCRVLGPGRGAHLLLHWERGRRVGLRQQLGLRRGAGGRAGGSTGLRGAPLLREVAAVRCAVHAARAHGAA

SEQ ID NO: 28354 - protein, 125 aa, Artificial Sequence
  Synthetic polypeptide
DSTDMTYLESAEPQRQMVECPQGPGPRLPGALLPAASGPLQLRALRQQDLPSALPGVGFWVRGEGPIFFYTGNEGDVWAFANNSAFVAELAAERGALLVFAEHRYYGKSLPFGAQSTQRGHTELL

SEQ ID NO: 28355 - protein, 254 aa, Artificial Sequence
  Synthetic polypeptide
NARRAPDPGFQERFFQQRLDHFNFERFGNKTFPQRFLVSDRFWVRGEGPIFFYTGNEGDVWAFANNSAFVAELAAERGALLVFAEHRYYGKSLPFGAQSTQRGHTELLTVEQALADFAELLRALRRDLGAQDAPAIAFGGRKPSHLSSQPPAQLGCAATLAAFPSESCTRTWPRVGICGSQKCRPPCGTCGPLRRKRGNGVLGAAALTLCPSPSYGGMLSAYLRMKYPHLVAGALAASAPVLAVAGLGDSNQFF

SEQ ID NO: 28356 - protein, 183 aa, Artificial Sequence
  Synthetic polypeptide
DSTDMTYLESAEPQRQMVECPQGPGPRLPGALLPAASGPLQLRALRQQDLPSALPGVGQVLGPGRGAHLLLHWERGRRVGLRQQLGLRRGAGGRAGGSTGLRGAPLLREVAAVRCAVHAARAHGAADGGAGPGRLRRAAPRATTRPRGPGCPRHRLRWKEALPPVLPATCSAWMCGHTSGLSQ

SEQ ID NO: 28357 - protein, 90 aa, Artificial Sequence
  Synthetic polypeptide
GGEVKGRRGMLQPEGPQASEEGGPRRRGQTASSAARPMTSPGTCPAASTVDTPSARRVCGGWTHRRPSSAGSPVRSAVRARPRLAEGWPC

SEQ ID NO: 28358 - protein, 37 aa, Artificial Sequence
  Synthetic polypeptide
EGRLREGEGCCSRRAPRPRRRGAPGGEDRLHHLLLGL

SEQ ID NO: 28359 - protein, 158 aa, Artificial Sequence
  Synthetic polypeptide
GKERDAAAGGPPGLGGGGPPEERTDCIICCSAYDLSGHLPRRLYCGHTFCQACVRRLDTPAPEQRWIPCPQCRQSTPTPRGGVAMLDLDLAAFLAVKAEREPARLEPLPLTSLKGSAITRQPAGLCPALGPQPHFPQPRYCCWGCGSLCCPPLGSPEV

SEQ ID NO: 28360 - protein, 437 aa, Artificial Sequence
  Synthetic polypeptide
GGGGGRGWAMQVLGAGTVAGVGRYREGGRAGRFRRGATGAGTRAIRVTCIGSCGVSNKANDTAWVVEEGYFNSSLSLADKGSLPAGEHSFPFQFLLPATAPTSFEGPFGKIVHQVRAAIHTPRFSKDHKCSLVFYILSPLNLNSIPDIEQPNVASATKKFSYKLVKTGSVVLTASTDLRGYVVGQALQLHADVENQSGKDTSPVVASLLQKVSYKAKRWIHDVRTIAEVEGAGVKAWRRAQWHEQILVPALPQSALPGCSLIHIDYYLQVSLKAPEATVTLPVFIGNIAVNHAPVSPRPGLGLPPGAPPLVVPSAPPQEEAEAEAAAGGPHFLDPVFLSTKSHSQRQPLLATLSSVPGAPEPCPQDGSPASHPLHPPLCISTGATVPYFAEGSGGPVPTTSTLILPPEYSSWGYPYEAPPSYEQSCGGVEPSLTPES

SEQ ID NO: 28361 - protein, 25 aa, Artificial Sequence
  Synthetic polypeptide
AGTGKAGGRAGSGGARQVLGREPSG

SEQ ID NO: 28362 - protein, 25 aa, Artificial Sequence
  Synthetic polypeptide
AGTGKAGGRAGSGGARQVLGREPSG

SEQ ID NO: 28363 - protein, 25 aa, Artificial Sequence
  Synthetic polypeptide
AGTGKAGGRAGSGGARQVLGREPSG

SEQ ID NO: 28364 - protein, 25 aa, Artificial Sequence
  Synthetic polypeptide
AGTGKAGGRAGSGGARQVLGREPSG

SEQ ID NO: 28365 - protein, 58 aa, Artificial Sequence
  Synthetic polypeptide
GRGGKGLGDAGVGGRDSCGGRQVPGRREGGQVPEGRDRCWDASHPGDLHRFLRGLQQG

SEQ ID NO: 28366 - protein, 58 aa, Artificial Sequence; identical to SEQ ID NO: 28365
  Synthetic polypeptide

SEQ ID NO: 28367 - protein, 58 aa, Artificial Sequence; identical to SEQ ID NO: 28365
  Synthetic polypeptide

SEQ ID NO: 28368 - protein, 58 aa, Artificial Sequence; identical to SEQ ID NO: 28365
  Synthetic polypeptide

SEQ ID NO: 28369 - protein, 181 aa, Artificial Sequence
  Synthetic polypeptide
GGGGGRGWAMQVLGAGTVAGVGRYREGGRAGRFRRGATGAGTRAIRVTCIGSCGVSNKANDTAWVVEEGYFNSSLSLADKGSLPAGEHSFPFQFLLPATAPTSFEGPFGKIVHQVRAAIHTPRFSKDHKCSLVFYILSPLNLNSIPDIEGSSLRTPAKPLPGPPPKQPNVASATKKFSYKL

SEQ ID NO: 28370 - protein, 127 aa, Artificial Sequence
  Synthetic polypeptide
GGGGGRGWAMQVLGAGTVAGVGRYREGGRAGRFRRGATGAGTRAIRVTCIGSCGVSNKANDTAWVVEEGYFNSSLSLADKGKFGSQFPSGDPWGQPLEWGLSVLSSPFPRSASWIWHWPILSQGCGP

SEQ ID NO: 28371 - protein, 275 aa, Artificial Sequence
  Synthetic polypeptide
GGGGGRGWAMQVLGAGTVAGVGRYREGGRAGRFRRGATGAGTRAIRVTCIGSCGVSNKANDTAWVVEEGYFNSSLSLADKGSLPAGEHSFPFQFLLPATAPTSFEGPFGKIVHQVRAAIHTPRFSKDHKCSLVFYILSPLNLNSIPDIEALQLHADVENQSGKDTSPVVASLLQKVSYKAKRWIHDVRTIAEVEGAGVKAWRRAQWHEQILVPALPQSALPGCSLIHIDYYLQVSLKAPEATVTLPVFIGNIAVNHAPVSPRPGLGLPPGAPPLV

SEQ ID NO: 28372 - protein, 31 aa, Artificial Sequence
  Synthetic polypeptide
LSLRSSEAGARAAAWMSLGDTVPNELACLLF

SEQ ID NO: 28373 - protein, 31 aa, Artificial Sequence; identical to SEQ ID NO: 28372
  Synthetic polypeptide

SEQ ID NO: 28374 - protein, 31 aa, Artificial Sequence; identical to SEQ ID NO: 28372
  Synthetic polypeptide

SEQ ID NO: 28375 - protein, 30 aa, Artificial Sequence
  Synthetic polypeptide
ASGTLCRMNLLAFCFSSCSISEEKTKNGNL

SEQ ID NO: 28376 - protein, 30 aa, Artificial Sequence; identical to SEQ ID NO: 28375
  Synthetic polypeptide

SEQ ID NO: 28377 - protein, 30 aa, Artificial Sequence; identical to SEQ ID NO: 28375
  Synthetic polypeptide

SEQ ID NO: 28378 - protein, 18 aa, Artificial Sequence
  Synthetic polypeptide
LNQTHRVVKIKLPELSSA

SEQ ID NO: 28379 - protein, 18 aa, Artificial Sequence
  Synthetic polypeptide
LNQTHRVVKIKLPELSSA

SEQ ID NO: 28380 - protein, 6 aa, Artificial Sequence
  Synthetic polypeptide
RLSFQS

SEQ ID NO: 28381 - protein, 6 aa, Artificial Sequence
  Synthetic polypeptide
RLSFQS

SEQ ID NO: 28382 - protein, 50 aa, Artificial Sequence
  Synthetic polypeptide
NPVSTKNTKISWAWWRMPVIPATRLNLPGRMCIVPIRKFRMLRISSTSHG

SEQ ID NO: 28383 - protein, 50 aa, Artificial Sequence; identical to SEQ ID NO: 28382
  Synthetic polypeptide

SEQ ID NO: 28384 - protein, 5 aa, Artificial Sequence
  Synthetic polypeptide
SQLLD

SEQ ID NO: 28385 - protein, 5 aa, Artificial Sequence
  Synthetic polypeptide
SQLLD

SEQ ID NO: 28386 - protein, 191 aa, Artificial Sequence
  Synthetic polypeptide
LGMVAYACNPSYSIEFARKNVYSANQKIQDAQDKLYLSWVEWKRSIGYDDTDESHCAEHIESRTLAIARNLTQQLQTTCHTLLSNIQGVPQNIQDQAKHMGVMAGDIYSVFRNAASFKEVSDSLLTSSKGQLQKMKESLDDVMDYLVNNTPLNWLVGPFYPQLTESQNAQDQGAEMDKSSQETQRSEHKTH

SEQ ID NO: 28387 - protein, 191 aa, Artificial Sequence; identical to SEQ ID NO: 28386
  Synthetic polypeptide

SEQ ID NO: 28388 - protein, 46 aa, Artificial Sequence
  Synthetic polypeptide
EGKVVGSPEVRSSRPVWPTRLNLPGRMCIVPIRKFRMLRISSTSHG

SEQ ID NO: 28389 - protein, 46 aa, Artificial Sequence; identical to SEQ ID NO: 28388
  Synthetic polypeptide

SEQ ID NO: 28390 - protein, 25 aa, Artificial Sequence
  Synthetic polypeptide
SQHFRRARWLDHLRSGVRDQSGQQD

SEQ ID NO: 28391 - protein, 25 aa, Artificial Sequence
  Synthetic polypeptide
SQHFRRARWLDHLRSGVRDQSGQQD

SEQ ID NO: 28392 - protein, 189 aa, Artificial Sequence
  Synthetic polypeptide
GQEFETSLANKIEFARKNVYSANQKIQDAQDKLYLSWVEWKRSIGYDDTDESHCAEHIESRTLAIARNLTQQLQTTCHTLLSNIQGVPQNIQDQAKHMGVMAGDIYSVFRNAASFKEVSDSLLTSSKGQLQKMKESLDDVMDYLVNNTPLNWLVGPFYPQLTESQNAQDQGAEMDKSSQETQRSEHKTH

SEQ ID NO: 28393 - protein, 189 aa, Artificial Sequence; identical to SEQ ID NO: 28392
  Synthetic polypeptide

SEQ ID NO: 28394 - protein, 12 aa, Artificial Sequence
  Synthetic polypeptide
LLGRLRKRSKKS

SEQ ID NO: 28395 - protein, 12 aa, Artificial Sequence
  Synthetic polypeptide
LLGRLRKRSKKS

SEQ ID NO: 28396 - protein, 231 aa, Artificial Sequence
  Synthetic polypeptide
PGQHGETLKNTKISWAWWLVPRVLATREAEKKKQKKLKDLIWFRSQLHSTVHLIEFARKNVYSANQKIQDAQDKLYLSWVEWKRSIGYDDTDESHCAEHIESRTLAIARNLTQQLQTTCHTLLSNIQGVPQNIQDQAKHMGVMAGDIYSVFRNAASFKEVSDSLLTSSKGQLQKMKESLDDVMDYLVNNTPLNWLVGPFYPQLTESQNAQDQGAEMDKSSQETQRSEHKTH

SEQ ID NO: 28397 - protein, 90 aa, Artificial Sequence
  Synthetic polypeptide
PGQHGETLKNTKISWAWWLVPRVLATREAEKKKQKKLKDLIWFRSQVIMLDWDPCLPSFTPVPTSRLSAGLKKLSKKANRPFLSSILLFT

SEQ ID NO: 28398 - protein, 261 aa, Artificial Sequence
  Synthetic polypeptide
SQLLWRLRQENCLKPGGGHYSKISNVLFFILPPICMCLFRQYATCFNSGIYLIWTLLVVVGIGSVYFHATLSFLGQMLDELAVLWVLMCALAMWFPRRYLPKIFRNDRGRFKVVVSVLSAVTTCLAFVKPAINNISLMTLGVPCTALLIAELKRCDNMRVFKLGLFSGLWWTLALFCWISDRAFCELLSSFNFPYLHCMWHILICLAAYLGCVCFAYFDAASEIPEQGPVIKFWPNEKWAFIGVPYVSLLCANKKSSVKIT

SEQ ID NO: 28399 - protein, 38 aa, Artificial Sequence
  Synthetic polypeptide
SQEADITVRSAMSYFSFYRPSACACFVSMQHASTVAST

SEQ ID NO: 28400 - protein, 102 aa, Artificial Sequence
  Synthetic polypeptide
GRARCLTPCNPFTLGDQGGGNHLRSGVRDQPGQQVMMMGSARVAELLLLHGAEPNCADPATLTRPVHDAAREGFLDTLVVLHRAGARLDVRDAWGRLPVDLA

SEQ ID NO: 28401 - protein, 102 aa, Artificial Sequence; identical to SEQ ID NO: 28400
  Synthetic polypeptide

SEQ ID NO: 28402 - protein, 102 aa, Artificial Sequence; identical to SEQ ID NO: 28400
  Synthetic polypeptide

SEQ ID NO: 28403 - protein, 12 aa, Artificial Sequence
  Synthetic polypeptide
GREFETSLANRS

SEQ ID NO: 28404 - protein, 12 aa, Artificial Sequence
  Synthetic polypeptide
GREFETSLANRS

SEQ ID NO: 28405 - protein, 12 aa, Artificial Sequence
  Synthetic polypeptide
GREFETSLANRS

SEQ ID NO: 28406 - protein, 12 aa, Artificial Sequence
  Synthetic polypeptide
GREFETSLANRS

SEQ ID NO: 28407 - protein, 12 aa, Artificial Sequence
  Synthetic polypeptide
GREFETSLANRS

SEQ ID NO: 28408 - protein, 12 aa, Artificial Sequence
  Synthetic polypeptide
GREFETSLANRS

SEQ ID NO: 28409 - protein, 12 aa, Artificial Sequence
  Synthetic polypeptide
GREFETSLANRS

SEQ ID NO: 28410 - protein, 92 aa, Artificial Sequence
  Synthetic polypeptide
SLHFGRSRRGESPEVGSSRPAWPTGHDDGQRPSGGAAAAPRRGAQLRRPRHSHPTRARRCPGGLPGHAGGAAPGRGAAGRARCLGPSARGPG

SEQ ID NO: 28411 - protein, 92 aa, Artificial Sequence; identical to SEQ ID NO: 28410
  Synthetic polypeptide

SEQ ID NO: 28412 - protein, 92 aa, Artificial Sequence; identical to SEQ ID NO: 28410
  Synthetic polypeptide

SEQ ID NO: 28413 - protein, 92 aa, Artificial Sequence; identical to SEQ ID NO: 28410
  Synthetic polypeptide

SEQ ID NO: 28414 - protein, 92 aa, Artificial Sequence; identical to SEQ ID NO: 28410
  Synthetic polypeptide

SEQ ID NO: 28415 - protein, 92 aa, Artificial Sequence; identical to SEQ ID NO: 28410
  Synthetic polypeptide

SEQ ID NO: 28416 - protein, 92 aa, Artificial Sequence; identical to SEQ ID NO: 28410
  Synthetic polypeptide

SEQ ID NO: 28417 - protein, 140 aa, Artificial Sequence
  Synthetic polypeptide
GRARCLTPCNPFTLGDQGGGNHLRSGVRDQPGQQVMMMGSARVAELLLLHGAEPNCADPATLTRPVHDAAREGFLDTLVVLHRAGARLDVRDAWGRLPVDLAEELGHRDVARYLRAAAGGTRGSNHARIDAAEGPSDIPD

SEQ ID NO: 28418 - protein, 122 aa, Artificial Sequence
  Synthetic polypeptide
GRARCLTPCNPFTLGDQGGGNHLRSGVRDQPGQQVMMMGSARVAELLLLHGAEPNCADPATLTRPVHDAAREGFLDTLVVLHRAGARLDVRDAWGRLPVDLAEELGHRDVARHPRLKEPERL

SEQ ID NO: 28419 - protein, 151 aa, Artificial Sequence
  Synthetic polypeptide
GRARCLTPCNPFTLGDQGGGNHLRSGVRDQPGQQVMMMGSARVAELLLLHGAEPNCADPATLTRPVHDAAREGFLDTLVVLHRAGARLDVRDAWGRLPVDLAEELGHRDVARYLRAAAGGTRGSNHARIDAAEGPSEMIGNHLWVCRSRHA

SEQ ID NO: 28420 - protein, 151 aa, Artificial Sequence; identical to SEQ ID NO: 28419
  Synthetic polypeptide

SEQ ID NO: 28421 - protein, 17 aa, Artificial Sequence
  Synthetic polypeptide
QAQGLRHERWPEDNIPW

SEQ ID NO: 28422 - protein, 17 aa, Artificial Sequence
  Synthetic polypeptide
QAQGLRHERWPEDNIPW

SEQ ID NO: 28423 - protein, 188 aa, Artificial Sequence
  Synthetic polypeptide
RHRGSGMKDGQKITFHGEGDQEPGLEPGDIIIVLDQKDHAVFTRRGEDLFMCMDIQLVEALCGFQKPISTLDNRTIVITSHPGQIVKHGDIKCVLNEGMPIYRRPYEKGRLIIEFKVNFPENGFLSPDKLSLLEKLLPERKEVEETDEMDQVELVDFDPNQERRRHYNGEAYEDDEHHPRGGVQCQTS

SEQ ID NO: 28424 - protein, 188 aa, Artificial Sequence; identical to SEQ ID NO: 28423
  Synthetic polypeptide

SEQ ID NO: 28425 - protein, 6 aa, Artificial Sequence
  Synthetic polypeptide
GTGAQA

SEQ ID NO: 28426 - protein, 6 aa, Artificial Sequence
  Synthetic polypeptide
GTGAQA

SEQ ID NO: 28427 - protein, 244 aa, Artificial Sequence
  Synthetic polypeptide
NLQSSGTFYTVAVPFDDDDKIVGGYTCEENSLPYQVSLNSGSHFCGGSLISEQWVVSAAHCYKTRIQVRLGEHNIKVLEGNEQFINAAKIIRHPKYNRDTLDNDIMLIKLSSPAVINARVSTISLPTTPPAAGTECLISGWGNTLSFGADYPDELKCLDAPVLTQAECKASYPGKITNSMFCVGFLEGGKDSCQRDSGGPVVCNGQLQGVVSWGHGCAWKNRPGVYTKVYNYVDWIKDTIAANS

SEQ ID NO: 28428 - protein, 244 aa, Artificial Sequence; identical to SEQ ID NO: 28427
  Synthetic polypeptide

SEQ ID NO: 28429 - protein, 244 aa, Artificial Sequence; identical to SEQ ID NO: 28427
  Synthetic polypeptide

SEQ ID NO: 28430 - protein, 244 aa, Artificial Sequence; identical to SEQ ID NO: 28427
  Synthetic polypeptide

SEQ ID NO: 28431 - protein, 48 aa, Artificial Sequence
  Synthetic polypeptide
QYDTCIPDQYKICKVQEPSILLLSPLTMMTRLLGATPVRRILSPTRCP

SEQ ID NO: 28432 - protein, 48 aa, Artificial Sequence; identical to SEQ ID NO: 28431
  Synthetic polypeptide

SEQ ID NO: 28433 - protein, 48 aa, Artificial Sequence; identical to SEQ ID NO: 28431
  Synthetic polypeptide

SEQ ID NO: 28434 - protein, 48 aa, Artificial Sequence; identical to SEQ ID NO: 28431
  Synthetic polypeptide

SEQ ID NO: 28435 - protein, 48 aa, Artificial Sequence; identical to SEQ ID NO: 28431
  Synthetic polypeptide

SEQ ID NO: 28436 - protein, 30 aa, Artificial Sequence
  Synthetic polypeptide
MPQYDNMTHASQTNIKSAKFRNLLYCCCPL

SEQ ID NO: 28437 - protein, 30 aa, Artificial Sequence; identical to SEQ ID NO: 28436
  Synthetic polypeptide

SEQ ID NO: 28438 - protein, 30 aa, Artificial Sequence; identical to SEQ ID NO: 28436
  Synthetic polypeptide

SEQ ID NO: 28439 - protein, 30 aa, Artificial Sequence; identical to SEQ ID NO: 28436
  Synthetic polypeptide

SEQ ID NO: 28440 - protein, 30 aa, Artificial Sequence; identical to SEQ ID NO: 28436
  Synthetic polypeptide

SEQ ID NO: 28441 - protein, 162 aa, Artificial Sequence
  Synthetic polypeptide
NLQSSGTFYTVAVPFDDDDKIVGGYTCEENSLPYQVSLNSGSHFCGGSLISEQWVVSAAHCYKTRIQVRLGEHNIKVLEGNEQFINAAKIIRHPKYNRDTLDNDIMLIKLSSPAVINARVSTISLPTTPPAAGTECLISGWGNTLSFGADYPDELKCLDAPV

SEQ ID NO: 28442 - protein, 24 aa, Artificial Sequence
  Synthetic polypeptide
CLCPTPGQLTQTSQEDSVNTTASR

SEQ ID NO: 28443 - protein, 24 aa, Artificial Sequence
  Synthetic polypeptide
CLCPTPGQLTQTSQEDSVNTTASR

SEQ ID NO: 28444 - protein, 24 aa, Artificial Sequence
  Synthetic polypeptide
CLCPTPGQLTQTSQEDSVNTTASR

SEQ ID NO: 28445 - protein, 24 aa, Artificial Sequence
  Synthetic polypeptide
CLCPTPGQLTQTSQEDSVNTTASR

SEQ ID NO: 28446 - protein, 24 aa, Artificial Sequence
  Synthetic polypeptide
CLCPTPGQLTQTSQEDSVNTTASR

SEQ ID NO: 28447 - protein, 19 aa, Artificial Sequence
  Synthetic polypeptide
IPPHPGETGRAQHQSPGGE

SEQ ID NO: 28448 - protein, 19 aa, Artificial Sequence
  Synthetic polypeptide
IPPHPGETGRAQHQSPGGE

SEQ ID NO: 28449 - protein, 19 aa, Artificial Sequence
  Synthetic polypeptide
IPPHPGETGRAQHQSPGGE

SEQ ID NO: 28450 - protein, 19 aa, Artificial Sequence
  Synthetic polypeptide
IPPHPGETGRAQHQSPGGE

SEQ ID NO: 28451 - protein, 19 aa, Artificial Sequence
  Synthetic polypeptide
IPPHPGETGRAQHQSPGGE

SEQ ID NO: 28452 - protein, 216 aa, Artificial Sequence
  Synthetic polypeptide
SYTLKRPKTEFLKILMPVSYPRAINSNFSGRQCEYHRIQVRLGEHNIKVLEGNEQFINAAKIIRHPKYNRDTLDNDIMLIKLSSPAVINARVSTISLPTTPPAAGTECLISGWGNTLSFGADYPDELKCLDAPVLTQAECKASYPGKITNSMFCVGFLEGGKDSCQRDSGGPVVCNGQLQGVVSWGHGCAWKNRPGVYTKVYNYVDWIKDTIAANS

SEQ ID NO: 28453 - protein, 216 aa, Artificial Sequence; identical to SEQ ID NO: 28452
  Synthetic polypeptide

SEQ ID NO: 28454 - protein, 216 aa, Artificial Sequence; identical to SEQ ID NO: 28452
  Synthetic polypeptide

SEQ ID NO: 28455 - protein, 216 aa, Artificial Sequence; identical to SEQ ID NO: 28452
  Synthetic polypeptide

SEQ ID NO: 28456 - protein, 134 aa, Artificial Sequence
  Synthetic polypeptide
SYTLKRPKTEFLKILMPVSYPRAINSNFSGRQCEYHRIQVRLGEHNIKVLEGNEQFINAAKIIRHPKYNRDTLDNDIMLIKLSSPAVINARVSTISLPTTPPAAGTECLISGWGNTLSFGADYPDELKCLDAPV

SEQ ID NO: 28457 - protein, 90 aa, Artificial Sequence
  Synthetic polypeptide
WRAPAVPTTWEPEGTQPTPALEPRNPGGDHRSRINASGPGPGRCLWGRCTPRPSRLLCCTSVCRGKMKLRFSTRRQASSSHCSQSNSWPS

SEQ ID NO: 28458 - protein, 90 aa, Artificial Sequence; identical to SEQ ID NO: 28457
  Synthetic polypeptide

SEQ ID NO: 28459 - protein, 90 aa, Artificial Sequence; identical to SEQ ID NO: 28457
  Synthetic polypeptide

SEQ ID NO: 28460 - protein, 90 aa, Artificial Sequence; identical to SEQ ID NO: 28457
  Synthetic polypeptide

SEQ ID NO: 28461 - protein, 90 aa, Artificial Sequence; identical to SEQ ID NO: 28457
  Synthetic polypeptide

SEQ ID NO: 28462 - protein, 95 aa, Artificial Sequence
  Synthetic polypeptide
SLDTRRSRPAWATGENPSLQKIQKLARHDGVRLRSQLLGSLRERSPPRLWSHGTPAATTAQGSTRADPGRVAASGGAVHRGRRGFCAVQVFAGER

SEQ ID NO: 28463 - protein, 95 aa, Artificial Sequence; identical to SEQ ID NO: 28462
  Synthetic polypeptide

SEQ ID NO: 28464 - protein, 95 aa, Artificial Sequence; identical to SEQ ID NO: 28462
  Synthetic polypeptide

SEQ ID NO: 28465 - protein, 95 aa, Artificial Sequence; identical to SEQ ID NO: 28462
  Synthetic polypeptide

SEQ ID NO: 28466 - protein, 95 aa, Artificial Sequence; identical to SEQ ID NO: 28462
  Synthetic polypeptide

SEQ ID NO: 28467 - protein, 95 aa, Artificial Sequence; identical to SEQ ID NO: 28462
  Synthetic polypeptide

SEQ ID NO: 28468 - protein, 97 aa, Artificial Sequence
  Synthetic polypeptide
WRAPAVPTTWEPEGTQPTPALEPRNPGGDHRSRINASGPGPGRCLWGRCTPRPSRLLCCTSVCRGKMKLRFSTRRQASSSHCSQVGLAEVCAGSGEF

SEQ ID NO: 28469 - protein, 40 aa, Artificial Sequence
  Synthetic polypeptide
SQHFGRPRQVDHEVKRSRPSWPTWLRDSGPRTGHICTPAL

SEQ ID NO: 28470 - protein, 189 aa, Artificial Sequence
  Synthetic polypeptide
PGTVAHACNPSTLGGQGRWITRSRDQDHPGQHGSETQVPGLDISALLPSDFSRYFQYEGSLTTPPCAQGVIWTVFNQTVMLSAKQLHTLSDTLWGPGDSRLQLNFRATQPLNGRVIEASFPAGVDSSPRAAEPVQLNSCLAAGDILALVFGLLFAVTSVAFLVQMRRQHRRGTKGGVSYRPAEVAETGA

SEQ ID NO: 28471 - protein, 60 aa, Artificial Sequence
  Synthetic polypeptide
RARWLTPVIPALWEAKAGGSRGQEIKTILANMAQRLRSQDWTYLHSCPLTSAATSNMRGL

SEQ ID NO: 28472 - protein, 7 aa, Artificial Sequence
  Synthetic polypeptide
VPQRLYW

SEQ ID NO: 28473 - protein, 16 aa, Artificial Sequence
  Synthetic polypeptide
FLKDCIGDHVPRTPKS

SEQ ID NO: 28474 - protein, 759 aa, Artificial Sequence
  Synthetic polypeptide
SSKTVLVITYREPPNPEYQEFQNRLLIRAREDFGVELGPSLMNLIAGCFYDGILLYAEVLNETIQEGGTREDGLRIVEKMQGRRYHGVTGLVVMDKNNDRETDFVLWAMGDLDSGDFQPAAHYSGAEKQIWWTGRPIPWVKGAPPSDNPPCAFDLDDPSCDKTPLSTLAIVALGTGITFIMFGVSSFLIFRKLMLEKELASMLWRIRWEELQFGNSERYHKGAGSRLTLSLRGSSYGSLMTAHGKYQIFANTGHFKGNVVAIKHVNKKRIELTRQVLFELKHMRDVQFNHLTRFIGACIDPPNICIVTEYCPRGSLQDILENDSINLDWMFRYSLINDLVKGMAFLHNSIISSHGSLKSSNCVVDSRFVLKITDYGLASFRSTAEPDDSHALYAKKLWTAPELLSGNPLPTTGMQKADVYSFGIILQEIALRSGPFYLEGLDLSPKEIVQKVRNGQRPYFRPSIDRTQLNEELVLLMERCWAQDPAERPDFGQIKGFIRRFNKEGGTSILDNLLLRMEQYANNLEKLVEERTQAYLEEKRKAEALLYQILPHSVAEQLKRGETVQAEAFDSVTIYFSDIVGFTALSAESTPMQVVTLLNDLYTCFDAIIDNFDVYKVETIGDAYMVVSGLPGRNGQRHAPEIARMALALLDAVSSFRIRHRPHDQLRLRIGVHTGPVCAGVVGLKMPRYCLFGDTVNTASRMESNGQALKIHVSSTTKDALDELGCFQLELRGDVEMKGKGKMRTYWLLGERKGPPGLL

SEQ ID NO: 28475 - protein, 118 aa, Artificial Sequence
  Synthetic polypeptide
GESPWPASSSLSVPPPGLPGCESHSRRRGPGSWPSAPCAGWGLGSCGAATRRPRCGCAPSCPHAWTTAGPTASASCCAHTIICTQPASARPGGEAGAAPTVQMRSPMDSSCCPHSCSA

SEQ ID NO: 28476 - protein, 118 aa, Artificial Sequence; identical to SEQ ID NO: 28475
  Synthetic polypeptide

SEQ ID NO: 28477 - protein, 118 aa, Artificial Sequence; identical to SEQ ID NO: 28475
  Synthetic polypeptide

SEQ ID NO: 28478 - protein, 118 aa, Artificial Sequence; identical to SEQ ID NO: 28475
  Synthetic polypeptide

SEQ ID NO: 28479 - protein, 204 aa, Artificial Sequence
  Synthetic polypeptide
VRVPGRLPPLCQCHHQGCQAANPIPADGDLVPGPPLPVRGGASVRAVPQRDGRGADAHLPVPMRGRLRALRPVQAAAHTQLSVRSLRVQGRVERLGLHRQCRCAHLWIPAAVHTPALPEQPHVSATCGPGHSESICAGSCSLHLHHVLLHGMRWCLHLITGCLCMVVGHSLYFHHVLRGFGNVCAFTVSSTDRDSSASQTVMHR

SEQ ID NO: 28480 - protein, 204 aa, Artificial Sequence; identical to SEQ ID NO: 28479
  Synthetic polypeptide

SEQ ID NO: 28481 - protein, 155 aa, Artificial Sequence
  Synthetic polypeptide
VRVPGRLPPLCQCHHQGCQAANPIPADGDLVPGPPLPVRGGASVRAVPQRDGRGADAHLPVPMRGRLRALRPVQAAAHTQLSVRSLRVQGRVERLGLHRQCRCAHLWIPAAVHTPALPEQPHVSATCGPGHSESICAGSCSLHLHHVLLHVLSCL

SEQ ID NO: 28482 - protein, 155 aa, Artificial Sequence; identical to SEQ ID NO: 28481
  Synthetic polypeptide

SEQ ID NO: 28483 - protein, 8 aa, Artificial Sequence
  Synthetic polypeptide
GFLVHSQC

SEQ ID NO: 28484 - protein, 8 aa, Artificial Sequence
  Synthetic polypeptide
GFLVHSQC

SEQ ID NO: 28485 - protein, 39 aa, Artificial Sequence
  Synthetic polypeptide
SPSGLGLCEGEMPEATQRTCQSQPTTRAFWYTVSADSCL

SEQ ID NO: 28486 - protein, 39 aa, Artificial Sequence; identical to SEQ ID NO: 28485
  Synthetic polypeptide

SEQ ID NO: 28487 - protein, 411 aa, Artificial Sequence
  Synthetic polypeptide
RLQDLGSVKEKCPKLHSGPVRASPQLGLSGTQSVLTVACEQTEVLLFDPISSKHIKTLSEAHEDCVNNIRFLDNRLFATCSDDTTIALWDLRKLNTKVCTLHGHTSWVKNIEYDTNTRLLVTSGFDGNVIIWDTNRYTEDGCPHKKFFHTRFLMRMRLTPDCSKMLISTSSGYLLILHDLDLTKSLEVGSYPILRARRTTSSSDLTTSSSSSGPRVSGSPCHHSDSNSSEKHMSRASQREGVSPRNSLEVVTPEVLGESDHGNCITSLQLHPKGWATLLRCSSNSDDEECTCVYEFQEGAPVRPVSPRCSLRLTHYIEEANVGRGYIKELCFSPDGRMISSPHGYGIRLLGFDKQCSELVDCLPKEASPLRVIRSLYSHNDVVLTTKFSPTHCQIASGCLSGRVSLYQPKF

SEQ ID NO: 28488 - protein, 374 aa, Artificial Sequence
  Synthetic polypeptide
RLQDLGSVKEKCPKLHSGPVRASPQLGLSGTQSVLTVACEQTEVLLFDPISSKHIKTLSEAHEDCVNNIRFLDNRLFATCSDDTTIALWDLRKLNTKVCTLHGHTSWVKNIEYDTNTRLLVTSGFDGNVIIWDTNRYTEDGCPHKKFFHTRFLMRMRLTPDCSKMLISTSSGYLLILHDLDLTKSLEVGSYPILRARRTTSSSGVSPRNSLEVVTPEVLGESDHGNCITSLQLHPKGWATLLRCSSNSDDEECTCVYEFQEGAPVRPVSPRCSLRLTHYIEEANVGRGYIKELCFSPDGRMISSPHGYGIRLLGFDKQCSELVDCLPKEASPLRVIRSLYSHNDVVLTTKFSPTHCQIASGCLSGRVSLYQPKF

SEQ ID NO: 28489 - protein, 235 aa, Artificial Sequence
  Synthetic polypeptide
GEGAVTSMFWVDAELGSDIYLDGIITIVDSKYGLKHLTEEKPDGLINEATRQVALADIILINKTDLVPEEDVKKLRTTIRSINGLGQILETQRSSLQKKLQHVPGTQPHLDQSIVTITFEVPGNAKEEHLNMFIQNLLWEKNVRNKDNHCMEVIRLKGLVSIKDKSQQVIVQGVHELYDLEETPVSWKDDTERTNRLVLIGRNLDKDILKQLFIATVTETEKQWTTHFKEDQVCT

SEQ ID NO: 28490 - protein, 254 aa, Artificial Sequence
  Synthetic polypeptide
GEGAVTSMFWVDAELGSDIYLDGIITIVDSKYGLKHLTEEKPDGLINEATRQVALADIILINKTDLVPEEDVKKLRTTIRSINGLGQILETQRSRVDLSNVLDLHAFDSLSGISLQKKLQHVPGTQPHLDQSIVTITFEVPGNAKEEHLNMFIQNLLWEKNVRNKDNHCMEVIRLKGLVSIKDKSQQVIVQGVHELYDLEETPVSWKDDTERTNRLVLIGRNLDKDILKQLFIATVTETEKQWTTHFKEDQVCT

SEQ ID NO: 28491 - protein, 21 aa, Artificial Sequence
  Synthetic polypeptide
GCPKAGRRPMRGRCSDFYVLG

SEQ ID NO: 28492 - protein, 21 aa, Artificial Sequence
  Synthetic polypeptide
GCPKAGRRPMRGRCSDFYVLG

SEQ ID NO: 28493 - protein, 30 aa, Artificial Sequence
  Synthetic polypeptide
PWHSWFETRVRFRPLGVPKSGQKAHEGKVQ

SEQ ID NO: 28494 - protein, 30 aa, Artificial Sequence; identical to SEQ ID NO: 28493
  Synthetic polypeptide

SEQ ID NO: 28495 - protein, 39 aa, Artificial Sequence
  Synthetic polypeptide
GWAWWLTPVIPALREAEVPNAPPAYEKLSAEQSPPPYSP

SEQ ID NO: 28496 - protein, 39 aa, Artificial Sequence; identical to SEQ ID NO: 28495
  Synthetic polypeptide

SEQ ID NO: 28497 - protein, 39 aa, Artificial Sequence; identical to SEQ ID NO: 28495
  Synthetic polypeptide

SEQ ID NO: 28498 - protein, 30 aa, Artificial Sequence
  Synthetic polypeptide
SQHFGRPRFPMLHLLMRNSLQNSHHHLIHL

SEQ ID NO: 28499 - protein, 30 aa, Artificial Sequence; identical to SEQ ID NO: 28498
  Synthetic polypeptide

SEQ ID NO: 28500 - protein, 30 aa, Artificial Sequence; identical to SEQ ID NO: 28498
  Synthetic polypeptide

SEQ ID NO: 28501 - protein, 24 aa, Artificial Sequence
  Synthetic polypeptide
MGMVAHTCNPSTSGGRGSQCSTCL

SEQ ID NO: 28502 - protein, 24 aa, Artificial Sequence
  Synthetic polypeptide
MGMVAHTCNPSTSGGRGSQCSTCL

SEQ ID NO: 28503 - protein, 24 aa, Artificial Sequence
  Synthetic polypeptide
MGMVAHTCNPSTSGGRGSQCSTCL

SEQ ID NO: 28504 - protein, 56 aa, Artificial Sequence
  Synthetic polypeptide
GWAWWLTPVIPALREAEVGGSPDLRSSRPAWQTWFPMLHLLMRNSLQNSHHHLIHL

SEQ ID NO: 28505 - protein, 56 aa, Artificial Sequence; identical to SEQ ID NO: 28504
  Synthetic polypeptide

SEQ ID NO: 28506 - protein, 56 aa, Artificial Sequence; identical to SEQ ID NO: 28504
  Synthetic polypeptide

SEQ ID NO: 28507 - protein, 32 aa, Artificial Sequence
  Synthetic polypeptide
SQHFGRPRWVDHLISGARDQPGKHGSQCSTCL

SEQ ID NO: 28508 - protein, 32 aa, Artificial Sequence; identical to SEQ ID NO: 28507
  Synthetic polypeptide

SEQ ID NO: 28509 - protein, 32 aa, Artificial Sequence; identical to SEQ ID NO: 28507
  Synthetic polypeptide

SEQ ID NO: 28510 - protein, 33 aa, Artificial Sequence
  Synthetic polypeptide
SQELETSLANMVPNAPPAYEKLSAEQSPPPYSP

SEQ ID NO: 28511 - protein, 33 aa, Artificial Sequence; identical to SEQ ID NO: 28510
  Synthetic polypeptide

SEQ ID NO: 28512 - protein, 33 aa, Artificial Sequence; identical to SEQ ID NO: 28510
  Synthetic polypeptide

SEQ ID NO: 28513 - protein, 39 aa, Artificial Sequence
  Synthetic polypeptide
YSWICLPLEVIPTEGQRSLPHVLYEAPLWPYDKKGGLLL

SEQ ID NO: 28514 - protein, 39 aa, Artificial Sequence; identical to SEQ ID NO: 28513
  Synthetic polypeptide

SEQ ID NO: 28515 - protein, 31 aa, Artificial Sequence
  Synthetic polypeptide
SSPDASIIFLDLPASRSNPNRRPKKFAPCTL

SEQ ID NO: 28516 - protein, 31 aa, Artificial Sequence; identical to SEQ ID NO: 28515
  Synthetic polypeptide

SEQ ID NO: 28517 - protein, 734 aa, Artificial Sequence
  Synthetic polypeptide
EVRSPSARQLPRLRSEEPLRPAATPSGKYCTPRYLDYEDLERKYWKNLTFVAPIYGADINGSIYDEGVDEWNIARLNTVLDVVEEECGISIEGVNTPYLYFGMWKTTFAWHTEDMDLYSINYLHFGEPKSWYAIPPEHGKRLERLAQGFFPSSSQGCDAFLRHKMTLISPSVLKKYGIPFDKITQEAGEFMITFPYGYHAGFNHGFNCAESTNFATVRWIDYGKVAKLCTCRKDMVKISMDIFVRKFQPDRYQLWKQGKDIYTIDHTKPTPASTPEVKAWLQRRRKVRKASRSFQCARSTSKRPKADEEEEVSDEVDGAEVPNPDSVTDDLKVSEKSEAAVKLRNTEASSEEESSASRMQVEQNLSDHIKLSGNSCLSTSVTEDIKTEDDKAYAYRSVPSISSEADDSIPLSSGYEKPEKSDPSELSWPKSPESCSSVAESNGVLTEGEESDVESHGNGLEPGEIPAVPSGERNSFKVPSIAEGENKTSKSWRHPLSRPPARSPMTLVKQQAPSDEELPEVLSIEEEVEETESWAKPLIHLWQTKSPNFAAEQEYNATVARMKPHCAICTLLMPYHKPDSSNEENDARWETKLDEVVTSEGKTKPLIPEMCFIYSEENIEYSPPNAFLEEDGTSLLISCAKCCVRVHASCYGIPSHEICDGWLCARCKRNAWTAECCLCNLRGGALKQTKNNKWAHVMCAVAVPEVRFTNVPERTQIDVGRIPLQRLKLGRLGI

SEQ ID NO: 28518 - protein, 734 aa, Artificial Sequence; identical to SEQ ID NO: 28517
  Synthetic polypeptide

SEQ ID NO: 28519 - protein, 34 aa, Artificial Sequence
  Synthetic polypeptide
EVRSLSARQPPHLGNIVLQDTWITKIWSASTGRT

SEQ ID NO: 28520 - protein, 34 aa, Artificial Sequence; identical to SEQ ID NO: 28519
  Synthetic polypeptide

SEQ ID NO: 28521 - protein, 34 aa, Artificial Sequence; identical to SEQ ID NO: 28519
  Synthetic polypeptide

SEQ ID NO: 28522 - protein, 34 aa, Artificial Sequence; identical to SEQ ID NO: 28519
  Synthetic polypeptide

SEQ ID NO: 28523 - protein, 34 aa, Artificial Sequence; identical to SEQ ID NO: 28519
  Synthetic polypeptide

SEQ ID NO: 28524 - protein, 34 aa, Artificial Sequence; identical to SEQ ID NO: 28519
  Synthetic polypeptide

SEQ ID NO: 28525 - protein, 43 aa, Artificial Sequence
  Synthetic polypeptide
GASPPGSHPIWEILYSKILGLRRFGAQVLEELNFCGTYLWCRY

SEQ ID NO: 28526 - protein, 43 aa, Artificial Sequence; identical to SEQ ID NO: 28525
  Synthetic polypeptide

SEQ ID NO: 28527 - protein, 43 aa, Artificial Sequence; identical to SEQ ID NO: 28525
  Synthetic polypeptide

SEQ ID NO: 28528 - protein, 43 aa, Artificial Sequence; identical to SEQ ID NO: 28525
  Synthetic polypeptide

SEQ ID NO: 28529 - protein, 43 aa, Artificial Sequence; identical to SEQ ID NO: 28525
  Synthetic polypeptide

SEQ ID NO: 28530 - protein, 43 aa, Artificial Sequence; identical to SEQ ID NO: 28525
  Synthetic polypeptide

SEQ ID NO: 28531 - protein, 294 aa, Artificial Sequence
  Synthetic polypeptide
EVRSPSARQLPRLRSEEPLRPAATPSGKYCTPRYLDYEDLERKYWKNLTFVAPIYGADINGSIYDEGVDEWNIARLNTVLDVVEEECGISIEGVNTPYLYFGMWKTTFAWHTEDMDLYSINYLHFGEPKSWYAIPPEHGKRLERLAQGFFPSSSQGCDAFLRHKMTLISPSVLKKYGIPFDKITQEAGEFMITFPYGYHAGFNHGFNCAESTNFATVRWIDYGKVAKLCTCRKDMVKISMDIFVRKFQPDRYQLWKQGKDIYTIDHTKPTPASTPEVKAWLQRRRKVRKASRRL

SEQ ID NO: 28532 - protein, 72 aa, Artificial Sequence
  Synthetic polypeptide
EVRSPSARQLPRLRSEEPLRPAATPSGKYCTPRYLDYEDLERKYWKNLTFVAPIYGADINGSIYDEVHSYLQ

SEQ ID NO: 28533 - protein, 968 aa, Artificial Sequence
  Synthetic polypeptide
EVRSPSARQLPRLRSEEPLRPAATPSGKYCTPRYLDYEDLERKYWKNLTFVAPIYGADINGSIYDEGVDEWNIARLNTVLDVVEEECGISIEGVNTPYLYFGMWKTTFAWHTEDMDLYSINYLHFGEPKSWYAIPPEHGKRLERLAQGFFPSSSQGCDAFLRHKMTLISPSVLKKYGIPFDKITQEAGEFMITFPYGYHAGFNHGFNCAESTNFATVRWIDYGKVAKLCTCRKDMVKISMDIFVRKFQPDRYQLWKQGKDIYTIDHTKPTPASTPEVKAWLQRRRKVRKASRSFQCARSTSKRPKADEEEEVSDEVDGAEVPNPDSVTDDLKVSEKSEAAVKLRNTEASSEEESSASRMQVEQNLSDHIKLSGNSCLSTSVTEDIKTEDDKAYAYRSVPSISSEADDSIPLSSGYEKPEKSDPSELSWPKSPESCSSVAESNGVLTEGEESDVESHGNGLEPGEIPAVPSGERNSFKVPSIAEGENKTSKSWRHPLSRPPARSPMTLVKQQAPSDEELPEVLSIEEEVEETESWAKPLIHLWQTKSPNFAAEQEYNATVARMKPHCAICTLLMPYHKPDSSNEENDARWETKLDEVVTSEGKTKPLIPEMCFIYSEENIEYSPPNAFLEEDGTSLLISCAKCCVRVHASCYGIPSHEICDGWLCARCKRNAWTAECCLCNLRGGALKQTKNNKWAHVMCAVAVPEVRFTNVPERTQIDVGRIPLQRLKLKCIFCRHRVKRVSGACIQCSYGRCPASFHVTCAHAAGVLMEPDDWPYVVNITCFRHKVNPNVKSKACEKVISVGQTVITKHRNTRYYSCRVMAVTSQTFYEVMFDDGSFSRDTFPEDIVSRDCLKLGPPAEGEVVQVKWPDGKLYGAKYFGSNIAHMYQVEFEDGSQIAMKREDIYTLDEELPKRVKARFVSAGRCHLGTCQVNSLSSPHVSQAQQETYLGFWINSKKSQCNIFLSGTY

SEQ ID NO: 28534 - protein, 977 aa, Artificial Sequence
  Synthetic polypeptide
EVRSPSARQLPRLRSEEPLRPAATPSGKYCTPRYLDYEDLERKYWKNLTFVAPIYGADINGSIYDEGVDEWNIARLNTVLDVVEEECGISIEGVNTPYLYFGMWKTTFAWHTEDMDLYSINYLHFGEPKSWYAIPPEHGKRLERLAQGFFPSSSQGCDAFLRHKMTLISPSVLKKYGIPFDKITQEAGEFMITFPYGYHAGFNHGFNCAESTNFATVRWIDYGKVAKLCTCRKDMVKISMDIFVRKFQPDRYQLWKQGKDIYTIDHTKPTPASTPEVKAWLQRRRKVRKASRSFQCARSTSKRPKADEEEEVSDEVDGAEVPNPDSVTDDLKVSEKSEAAVKLRNTEASSEEESSASRMQVEQNLSDHIKLSGNSCLSTSVTEDIKTEDDKAYAYRSVPSISSEADDSIPLSSGYEKPEKSDPSELSWPKSPESCSSVAESNGVLTEGEESDVESHGNGLEPGEIPAVPSGERNSFKVPSIAEGENKTSKSWRHPLSRPPARSPMTLVKQQAPSDEELPEVLSIEEEVEETESWAKPLIHLWQTKSPNFAAEQEYNATVARMKPHCAICTLLMPYHKPDSSNEENDARWETKLDEVVTSEGKTKPLIPEMCFIYSEENIEYSPPNAFLEEDGTSLLISCAKCCVRVHASCYGIPSHEICDGWLCARCKRNAWTAECCLCNLRGGALKQTKNNKWAHVMCAVAVPEVRFTNVPERTQIDVGRIPLQRLKLKCIFCRHRVKRVSGACIQCSYGRCPASFHVTCAHAAGVLMEPDDWPYVVNITCFRHKVNPNVKSKACEKVISVGQTVITKHRNTRYYSCRVMAVTSQTFYEVMFDDGSFSRDTFPEDIVSRDCLKLGPPAEGEVVQVKWPDGKLYGAKYFGSNIAHMYQVEFEDGSQIAMKREDIYTLDEELPKRVKARFSTASDMRFEDTFYGADIIQGERKRQRVLSSRFKNEYVADPVYRTFLKSSFQKKCQKRQ

SEQ ID NO: 28535 - protein, 17 aa, Artificial Sequence
  Synthetic polypeptide
NEFAEKTSACARNTTSP

SEQ ID NO: 28536 - protein, 17 aa, Artificial Sequence
  Synthetic polypeptide
NEFAEKTSACARNTTSP

SEQ ID NO: 28537 - protein, 17 aa, Artificial Sequence
  Synthetic polypeptide
NEFAEKTSACARNTTSP

SEQ ID NO: 28538 - protein, 17 aa, Artificial Sequence
  Synthetic polypeptide
NEFAEKTSACARNTTSP

SEQ ID NO: 28539 - protein, 81 aa, Artificial Sequence
  Synthetic polypeptide
MSLQKKLQHVPGTQPHLDQSIVTITFDVPGNAKEEHLNMFIQNLLWEKNVRNKDNHCMEVIRLKVQFTVADFWTKSFSWLL

SEQ ID NO: 28540 - protein, 142 aa, Artificial Sequence
  Synthetic polypeptide
MSLQKKLQHVPGTQPHLDQSIVTITFDVPGNAKEEHLNMFIQNLLWEKNVRNKDNHCMEVIRLKGLVSIKDKSQQVIVQGVHELCDLEETPVSWKDDTERTNRLVLIGRNLDKDILKQLFIATVTETEKQWTTHFKEDQVCT

SEQ ID NO: 28541 - protein, 142 aa, Artificial Sequence; identical to SEQ ID NO: 28540
  Synthetic polypeptide

SEQ ID NO: 28542 - protein, 142 aa, Artificial Sequence; identical to SEQ ID NO: 28540
  Synthetic polypeptide

SEQ ID NO: 28543 - protein, 19 aa, Artificial Sequence
  Synthetic polypeptide
PLELCWEDNTSELYFDRAT

SEQ ID NO: 28544 - protein, 19 aa, Artificial Sequence
  Synthetic polypeptide
PLELCWEDNTSELYFDRAT

SEQ ID NO: 28545 - protein, 19 aa, Artificial Sequence
  Synthetic polypeptide
PLELCWEDNTSELYFDRAT

SEQ ID NO: 28546 - protein, 19 aa, Artificial Sequence
  Synthetic polypeptide
PLELCWEDNTSELYFDRAT

SEQ ID NO: 28547 - protein, 19 aa, Artificial Sequence
  Synthetic polypeptide
PLELCWEDNTSELYFDRAT

SEQ ID NO: 28548 - protein, 63 aa, Artificial Sequence
  Synthetic polypeptide
NCAGKTTLLNYILTEQHSKRVAVILNESGEGSALEKSLAVSQGGELYEEWLELRNGCLCCSVK

SEQ ID NO: 28549 - protein, 345 aa, Artificial Sequence
  Synthetic polypeptide
NCAGKTTLLNYILTEQHSKRVAVILNESGEGSALEKSLAVSQGGELYEEWLELRNGCLCCSVKDNGLRAIENLMQKKGKFDDILLETTGLADPGAVASMFWVDAELGSDIYLDGIITIVDSKYGLKHLTEEKPDGLINEATRQVALADIILINKTDLVPEEDVKKLRTTLRSINGLGQILETQRSRVDLSNVLDLHAFDSLSGISLQKKLQHVPGTQPHLDQSIVTITFDVPGNAKEEHLNMFIQNLLWEKNVRNKDNHCMEVIRLKGLVSIKDKSQQVIVQGVHELCDLEETPVSWKDDTERTNRLVLIGRNLDKDILKQLFIATVTETEKQWTTHFKEDQVCT

SEQ ID NO: 28550 - protein, 345 aa, Artificial Sequence; identical to SEQ ID NO: 28549
  Synthetic polypeptide

SEQ ID NO: 28551 - protein, 56 aa, Artificial Sequence
  Synthetic polypeptide
SVSFCQVNTHCSSPQEDTAFEIPSWKQRPALTRHKLPGTLILDFIASRTVLGRQHF

SEQ ID NO: 28552 - protein, 56 aa, Artificial Sequence; identical to SEQ ID NO: 28551
  Synthetic polypeptide

SEQ ID NO: 28553 - protein, 56 aa, Artificial Sequence; identical to SEQ ID NO: 28551
  Synthetic polypeptide

SEQ ID NO: 28554 - protein, 56 aa, Artificial Sequence; identical to SEQ ID NO: 28551
  Synthetic polypeptide

SEQ ID NO: 28555 - protein, 56 aa, Artificial Sequence; identical to SEQ ID NO: 28551
  Synthetic polypeptide

SEQ ID NO: 28556 - protein, 325 aa, Artificial Sequence
  Synthetic polypeptide
NCAGKTTLLNYILTEQHSKRVAVILNESGEGSALEKSLAVSQGGELYEEWLELRNGCLCCSVKDNGLRAIENLMQKKGKFDDILLETTGLADPGIITIVDSKYGLKHLTEEKPDGLINEATRQVALADIILINKTDLVPEEDVKKLRTTLRSINGLGQILETQRSRVDLSNVLDLHAFDSLSGISLQKKLQHVPGTQPHLDQSIVTITFDVPGNAKEEHLNMFIQNLLWEKNVRNKDNHCMEVIRLKGLVSIKDKSQQVIVQGVHELCDLEETPVSWKDDTERTNRLVLIGRNLDKDILKQLFIATVTETEKQWTTHFKEDQVCT

SEQ ID NO: 28557 - protein, 32 aa, Artificial Sequence
  Synthetic polypeptide
NCAGKTTLLNYILTEQHSKRVAVILNESGEGK

SEQ ID NO: 28558 - protein, 52 aa, Artificial Sequence
  Synthetic polypeptide
TSLMRSDGFEKGSFPAQALFSCLLPGETCLSPSAMIVRPLQPCGTVLGRQHF

SEQ ID NO: 28559 - protein, 52 aa, Artificial Sequence; identical to SEQ ID NO: 28558
  Synthetic polypeptide

SEQ ID NO: 28560 - protein, 52 aa, Artificial Sequence; identical to SEQ ID NO: 28558
  Synthetic polypeptide

SEQ ID NO: 28561 - protein, 52 aa, Artificial Sequence; identical to SEQ ID NO: 28558
  Synthetic polypeptide

SEQ ID NO: 28562 - protein, 23 aa, Artificial Sequence
  Synthetic polypeptide
GLSSHVELCWEDNTSELYFDRAT

SEQ ID NO: 28563 - protein, 23 aa, Artificial Sequence
  Synthetic polypeptide
GLSSHVELCWEDNTSELYFDRAT

SEQ ID NO: 28564 - protein, 23 aa, Artificial Sequence
  Synthetic polypeptide
GLSSHVELCWEDNTSELYFDRAT

SEQ ID NO: 28565 - protein, 23 aa, Artificial Sequence
  Synthetic polypeptide
GLSSHVELCWEDNTSELYFDRAT

SEQ ID NO: 28566 - protein, 80 aa, Artificial Sequence
  Synthetic polypeptide
DMPFTFCHDCEASPAMWNCAGKTTLLNYILTEQHSKRVAVILNESGEGSALEKSLAVSQGGELYEEWLELRNGCLCCSVK

SEQ ID NO: 28567 - protein, 362 aa, Artificial Sequence
  Synthetic polypeptide
DMPFTFCHDCEASPAMWNCAGKTTLLNYILTEQHSKRVAVILNESGEGSALEKSLAVSQGGELYEEWLELRNGCLCCSVKDNGLRAIENLMQKKGKFDDILLETTGLADPGAVASMFWVDAELGSDIYLDGIITIVDSKYGLKHLTEEKPDGLINEATRQVALADIILINKTDLVPEEDVKKLRTTIRSINGLGQILETQRSRVDLSNVLDLHAFDSLSGISLQKKLQHVPGTQPHLDQSIVTITFEVPGNAKEEHLNMFIQNLLWEKNVRNKDNHCMEVIRLKGLVSIKDKSQQVIVQGVHELYDLEETPVSWKDDTERTNRLVLIGRNLDKDILKQLFIATVTETEKQWTTHFKEDQVCT

SEQ ID NO: 28568 - protein, 342 aa, Artificial Sequence
  Synthetic polypeptide
DMPFTFCHDCEASPAMWNCAGKTTLLNYILTEQHSKRVAVILNESGEGSALEKSLAVSQGGELYEEWLELRNGCLCCSVKDNGLRAIENLMQKKGKFDDILLETTGLADPGIITIVDSKYGLKHLTEEKPDGLINEATRQVALADIILINKTDLVPEEDVKKLRTTIRSINGLGQILETQRSRVDLSNVLDLHAFDSLSGISLQKKLQHVPGTQPHLDQSIVTITFEVPGNAKEEHLNMFIQNLLWEKNVRNKDNHCMEVIRLKGLVSIKDKSQQVIVQGVHELYDLEETPVSWKDDTERTNRLVLIGRNLDKDILKQLFIATVTETEKQWTTHFKEDQVCT

SEQ ID NO: 28569 - protein, 127 aa, Artificial Sequence
  Synthetic polypeptide
DMPFTFCHDCEASPAMWNCAGKTTLLNYILTEQHSKRVAVILNESGEGSALEKSLAVSQGGELYEEWLELRNGCLCCSVKDNGLRAIENLMQKKGKFDDILLETTGLADPGIITIVDSKYGLKVKYH

SEQ ID NO: 28570 - protein, 38 aa, Artificial Sequence
  Synthetic polypeptide
VLKDESSQLKERKKNRMLRLLRPMVCIDNVLRRLCSTI

SEQ ID NO: 28571 - protein, 82 aa, Artificial Sequence
  Synthetic polypeptide
DLWCALTTYSEDYVPPYDYQPHAYPCQDDYSIVHRKCRSQFTDLNGSKRFGINTWHDESGIYANSDVKQKLYPLTSGPIVPI

SEQ ID NO: 28572 - protein, 17 aa, Artificial Sequence
  Synthetic polypeptide
GEKKKSYAEVAKTYGVH

SEQ ID NO: 28573 - protein, 48 aa, Artificial Sequence
  Synthetic polypeptide
QGSPAPDPRIGPWPVRNWATQQELNCRKLMQNFMMEYVSAVKKFLSGV

SEQ ID NO: 28574 - protein, 48 aa, Artificial Sequence; identical to SEQ ID NO: 28573
  Synthetic polypeptide

SEQ ID NO: 28575 - protein, 48 aa, Artificial Sequence; identical to SEQ ID NO: 28573
  Synthetic polypeptide

SEQ ID NO: 28576 - protein, 4 aa, Artificial Sequence
  Synthetic polypeptide
TAEN

SEQ ID NO: 28577 - protein, 4 aa, Artificial Sequence
  Synthetic polypeptide
TAEN

SEQ ID NO: 28578 - protein, 4 aa, Artificial Sequence
  Synthetic polypeptide
TAEN

SEQ ID NO: 28579 - protein, 149 aa, Artificial Sequence
  Synthetic polypeptide
GVPSPRPPHRSMACQELGHTAGVELQKINAKLHDGVCQRCKEVLEWRVKYSKYKPLSKPKKCVKCLQKTVKDSYHIMCRPCACELEVCAKCGKKEDIVIPLNKETEKIEHTENNLSSNHRRSCRRNEESDDDLDFDIDLEDTGGDHQMN

SEQ ID NO: 28580 - protein, 171 aa, Artificial Sequence
  Synthetic polypeptide
GVPSPRPPHRSMACQELGHTAGVELQKINAKLHDGVCQRCKEVLEWRVKYSKYKPLSKPKKCVKCLQKTVKDSYHIMCRPCACELEVCAKCGKKEDIVIPWSLPLLPRLECSGRILAHHNLRLPCSSDSPASASRVAGTTGAHHHAQLIFVFLVEMGFHYVGQAGLELLTS

SEQ ID NO: 28581 - protein, 61 aa, Artificial Sequence
  Synthetic polypeptide
GVPSPRPPHRSMACQELGHTAGVELQKINAKLHDGVCQRCKEVLEWRVKYSKYKPLSKPKK

SEQ ID NO: 28582 - protein, 46 aa, Artificial Sequence
  Synthetic polypeptide
VDITCKFITNANSGFTRDLLIQNQYLNKVPGESTVSMNIQRSKQSQ

SEQ ID NO: 28583 - protein, 10 aa, Artificial Sequence
  Synthetic polypeptide
IRSQGRVRFP

SEQ ID NO: 28584 - protein, 26 aa, Artificial Sequence
  Synthetic polypeptide
GPRGEYGFHEYTEVKTVTVKISQKNS

SEQ ID NO: 28585 - protein, 491 aa, Artificial Sequence
  Synthetic polypeptide
AWQPTTLKWNQQIFINNEWHDSVSGKKFPVFNPATEEELCQVEEGDKEDVDKAVKAARQAFQIGSPWRTMDASERGRLLYKLADLIERDRLLLATMESMNGGKLYSNAYLNDLAGCIKTLRYCAGWADKIQGRTIPIDGNFFTYTRHEPIGVCGQIIPWNFPLVMLIWKIGPALSCGNTVVVKPAEQTPLTALHVASLIKEAGFPPGVVNIVPGYGPTAGAAISSHMDIDKVAFTGSTEVGKLIKEAAGKSNLKRVTLELGGKSPCIVLADADLDNAVEFAHHGVFYHQGQCCIAASRIFVEESIYDEFVRRSVERAKKYILGNPLTPGVTQGPQIDKEQYDKILDLIESGKKEGAKLECGGGPWGNKGYFVQPTVFSNVTDEMRIAKEEIFGPVQQIMKFKSLDDVIKRANNTFYGLSAGVFTKDIDKAITISSALQAGTVWVNCYGVVSAQCPFGGFKMSGNGRELGEYGFHEYTEVKTVTVKISQKNS

SEQ ID NO: 28586 - protein, 7 aa, Artificial Sequence
  Synthetic polypeptide
NGISRSS

SEQ ID NO: 28587 - protein, 7 aa, Artificial Sequence
  Synthetic polypeptide
NGISRSS

SEQ ID NO: 28588 - protein, 7 aa, Artificial Sequence
  Synthetic polypeptide
NGISRSS

SEQ ID NO: 28589 - protein, 7 aa, Artificial Sequence
  Synthetic polypeptide
NGISRSS

SEQ ID NO: 28590 - protein, 27 aa, Artificial Sequence
  Synthetic polypeptide
LPPGALSCLIGLATHNPEMESADLHKQ

SEQ ID NO: 28591 - protein, 27 aa, Artificial Sequence
  Synthetic polypeptide
LPPGALSCLIGLATHNPEMESADLHKQ

SEQ ID NO: 28592 - protein, 27 aa, Artificial Sequence
  Synthetic polypeptide
LPPGALSCLIGLATHNPEMESADLHKQ

SEQ ID NO: 28593 - protein, 27 aa, Artificial Sequence
  Synthetic polypeptide
LPPGALSCLIGLATHNPEMESADLHKQ

SEQ ID NO: 28594 - protein, 220 aa, Artificial Sequence
  Synthetic polypeptide
AWQPTTLKWNQQIFINNEWHDSVSGKKFPVFNPATEEELCQVEEGDKEDVDKAVKAARQAFQIGSPWRTMDASERGRLLYKLADLIERDRLLLATMESMNGGKLYSNAYLNDLAGCIKTLRYCAGWADKIQGRTIPIDGNFFTYTRHEPIGVCGQIIPWNFPLVMLIWKIGPALSCGNTVVVKPAEQTPLTALHVASLIKEAGFPPGVVNIVPGYGASVV

SEQ ID NO: 28595 - protein, 228 aa, Artificial Sequence
  Synthetic polypeptide
AWQPTTLKWNQQIFINNEWHDSVSGKKFPVFNPATEEELCQVEEGDKEDVDKAVKAARQAFQIGSPWRTMDASERGRLLYKLADLIERDRLLLATMESMNGGKLYSNAYLNDLAGCIKTLRYCAGWADKIQGRTIPIDGNFFTYTRHEPIGVCGQIIPWNFPLVMLIWKIGPALSCGNTVVVKPAEQTPLTALHVASLIKEAGFPPGVVNIVPGYGPTAGAAISSHMD

SEQ ID NO: 28596 - protein, 193 aa, Artificial Sequence
  Synthetic polypeptide
AWQPTTLKWNQQIFINNEWHDSVSGKKFPVFNPATEEELCQVEEGDKEDVDKAVKAARQAFQIGSPWRTMDASERGRLLYKLADLIERDRLLLATMESMNGGKLYSNAYLNDLAGCIKTLRYCAGWADKIQGRTIPIDGNFFTYTRHEPIGVCGQIIPWNFPLVMLIWKIGPALSCGNTVVVKPAEQTPLTAL

SEQ ID NO: 28597 - protein, 49 aa, Artificial Sequence
  Synthetic polypeptide
GKGRHVPCGKEKVGGEACPRSPGWEERSADSQGTYSFLLHSIAGDLHKQ

SEQ ID NO: 28598 - protein, 49 aa, Artificial Sequence; identical to SEQ ID NO: 28597
  Synthetic polypeptide

SEQ ID NO: 28599 - protein, 49 aa, Artificial Sequence; identical to SEQ ID NO: 28597
  Synthetic polypeptide

SEQ ID NO: 28600 - protein, 49 aa, Artificial Sequence; identical to SEQ ID NO: 28597
  Synthetic polypeptide

SEQ ID NO: 28601 - protein, 537 aa, Artificial Sequence
  Synthetic polypeptide
SAFLALLEGIMPDRGKGDMCLVEKRRWEGRHAPEVQDGKRDLQTPREPTAFSFTALQEIFINNEWHDSVSGKKFPVFNPATEEELCQVEEGDKEDVDKAVKAARQAFQIGSPWRTMDASERGRLLYKLADLIERDRLLLATMESMNGGKLYSNAYLNDLAGCIKTLRYCAGWADKIQGRTIPIDGNFFTYTRHEPIGVCGQIIPWNFPLVMLIWKIGPALSCGNTVVVKPAEQTPLTALHVASLIKEAGFPPGVVNIVPGYGPTAGAAISSHMDIDKVAFTGSTEVGKLIKEAAGKSNLKRVTLELGGKSPCIVLADADLDNAVEFAHHGVFYHQGQCCIAASRIFVEESIYDEFVRRSVERAKKYILGNPLTPGVTQGPQIDKEQYDKILDLIESGKKEGAKLECGGGPWGNKGYFVQPTVFSNVTDEMRIAKEEIFGPVQQIMKFKSLDDVIKRANNTFYGLSAGVFTKDIDKAITISSALQAGTVWVNCYGVVSAQCPFGGFKMSGNGRELGEYGFHEYTEVKTVTVKISQKNS

SEQ ID NO: 28602 - protein, 70 aa, Artificial Sequence
  Synthetic polypeptide
DRKANYPADDLPSWHSLRELCQIGERETCALWKREGGRGGMPQKSRMGREICRLPGNLQLSPSQHCRRSS

SEQ ID NO: 28603 - protein, 70 aa, Artificial Sequence; identical to SEQ ID NO: 28602
  Synthetic polypeptide

SEQ ID NO: 28604 - protein, 70 aa, Artificial Sequence; identical to SEQ ID NO: 28602
  Synthetic polypeptide

SEQ ID NO: 28605 - protein, 70 aa, Artificial Sequence; identical to SEQ ID NO: 28602
  Synthetic polypeptide

SEQ ID NO: 28606 - protein, 266 aa, Artificial Sequence
  Synthetic polypeptide
SAFLALLEGIMPDRGKGDMCLVEKRRWEGRHAPEVQDGKRDLQTPREPTAFSFTALQEIFINNEWHDSVSGKKFPVFNPATEEELCQVEEGDKEDVDKAVKAARQAFQIGSPWRTMDASERGRLLYKLADLIERDRLLLATMESMNGGKLYSNAYLNDLAGCIKTLRYCAGWADKIQGRTIPIDGNFFTYTRHEPIGVCGQIIPWNFPLVMLIWKIGPALSCGNTVVVKPAEQTPLTALHVASLIKEAGFPPGVVNIVPGYGASVV

SEQ ID NO: 28607 - protein, 274 aa, Artificial Sequence
  Synthetic polypeptide
SAFLALLEGIMPDRGKGDMCLVEKRRWEGRHAPEVQDGKRDLQTPREPTAFSFTALQEIFINNEWHDSVSGKKFPVFNPATEEELCQVEEGDKEDVDKAVKAARQAFQIGSPWRTMDASERGRLLYKLADLIERDRLLLATMESMNGGKLYSNAYLNDLAGCIKTLRYCAGWADKIQGRTIPIDGNFFTYTRHEPIGVCGQIIPWNFPLVMLIWKIGPALSCGNTVVVKPAEQTPLTALHVASLIKEAGFPPGVVNIVPGYGPTAGAAISSHMD

SEQ ID NO: 28608 - protein, 239 aa, Artificial Sequence
  Synthetic polypeptide
SAFLALLEGIMPDRGKGDMCLVEKRRWEGRHAPEVQDGKRDLQTPREPTAFSFTALQEIFINNEWHDSVSGKKFPVFNPATEEELCQVEEGDKEDVDKAVKAARQAFQIGSPWRTMDASERGRLLYKLADLIERDRLLLATMESMNGGKLYSNAYLNDLAGCIKTLRYCAGWADKIQGRTIPIDGNFFTYTRHEPIGVCGQIIPWNFPLVMLIWKIGPALSCGNTVVVKPAEQTPLTAL

SEQ ID NO: 28609 - protein, 78 aa, Artificial Sequence
  Synthetic polypeptide
RKHRADKNLLRVEGPAGEGHSELLQMKRTRMFILGKTQKAHKCHLQMMEGLFMYVGEALDLPGASELELIHHTPCALE

SEQ ID NO: 28610 - protein, 78 aa, Artificial Sequence; identical to SEQ ID NO: 28609
  Synthetic polypeptide

SEQ ID NO: 28611 - protein, 17 aa, Artificial Sequence
  Synthetic polypeptide
TFLEPQSLNSSTIHHVL

SEQ ID NO: 28612 - protein, 17 aa, Artificial Sequence
  Synthetic polypeptide
TFLEPQSLNSSTIHHVL

SEQ ID NO: 28613 - protein, 42 aa, Artificial Sequence
  Synthetic polypeptide
STWHTELAISACGSSLEILCISAVMTILLQMIPRQSMLLSLV

SEQ ID NO: 28614 - protein, 42 aa, Artificial Sequence; identical to SEQ ID NO: 28613
  Synthetic polypeptide

SEQ ID NO: 28615 - protein, 42 aa, Artificial Sequence; identical to SEQ ID NO: 28613
  Synthetic polypeptide

SEQ ID NO: 28616 - protein, 42 aa, Artificial Sequence; identical to SEQ ID NO: 28613
  Synthetic polypeptide

SEQ ID NO: 28617 - protein, 33 aa, Artificial Sequence
  Synthetic polypeptide
TGVLSAPSKALGIQSWRFQRVGVLWKSCVFLLL

SEQ ID NO: 28618 - protein, 33 aa, Artificial Sequence; identical to SEQ ID NO: 28617
  Synthetic polypeptide

SEQ ID NO: 28619 - protein, 33 aa, Artificial Sequence; identical to SEQ ID NO: 28617
  Synthetic polypeptide

SEQ ID NO: 28620 - protein, 33 aa, Artificial Sequence; identical to SEQ ID NO: 28617
  Synthetic polypeptide

SEQ ID NO: 28621 - protein, 639 aa, Artificial Sequence
  Synthetic polypeptide
MGYCQRLVKHLAYRVGDFSVWEFSGNPVYFCCYDYFAANDPTSIHVVVFSLEEPYEIQLNQVIFWLSFLKSLVPVEEPIAFGGKLKNPLQVVLVATHADIMNVPRPAGGEFGYDKDTSLLKEIRNRFGNDLHISNKLFVLDAGASGSKDMKVLRNHLQEIRSQIVSVCPPMTHLCEKIISTLPSWRKLNGPNQLMSLQQFVYDVQDQLNPLASEEDLRRIAQQLHSTGEINIMQSETVQDVLLLDPRWLCTNVLGKLLSVETPRALHHYRGRYTVEDIQRLVPDSDVEELLQILDAMDICARDLSSGTMVDVPALIKTDNLHRSWADEEDEVMVYGGVRIVPVEHLTPFPCGIFHKVQVNLCRWIHQQSTEGDADIRLWVNGCKLANRGAELLVLLVNHGQGIEVQVRGLETEKIKCCLLLDSVCSTIENVMATTLPGLLTVKHYLSPQQLREHHEPVMIYQPRDFFRAQTLKETSLTNTMGGYKESFSSIMCFGCHDVYSQASLGMDIHASDLNLLTRRKLSRLLDPPDPLGKDWCLLAMNLGLPDLVAKYNTSNGAPKDFLPSPLHALLREWTTYPESTVGTLMSKLRELGRRDAADFLLKASSVFKINLDGNGQEAYASSCNSGTSYNSISSVVSR

SEQ ID NO: 28622 - protein, 639 aa, Artificial Sequence; identical to SEQ ID NO: 28621
  Synthetic polypeptide

SEQ ID NO: 28623 - protein, 639 aa, Artificial Sequence; identical to SEQ ID NO: 28621
  Synthetic polypeptide

SEQ ID NO: 28624 - protein, 664 aa, Artificial Sequence
  Synthetic polypeptide
MGYCQRLVKHLAYRVGDFSVWEFSGNPVYFCCYDYFAANDPTSIHVVVFSLEEPYEIQLNQVIFWLSFLKSLVPVEEPIAFGGKLKNPLQVVLVATHADIMNVPRPAGGEFGYDKDTSLLKEIRNRFGNDLHISNKLFVLDAGASGSKDMKVLRNHLQEIRSQIVSKTLPFTPDILVGVPLWHHQKIGGSPVCPPMTHLCEKIISTLPSWRKLNGPNQLMSLQQFVYDVQDQLNPLASEEDLRRIAQQLHSTGEINIMQSETVQDVLLLDPRWLCTNVLGKLLSVETPRALHHYRGRYTVEDIQRLVPDSDVEELLQILDAMDICARDLSSGTMVDVPALIKTDNLHRSWADEEDEVMVYGGVRIVPVEHLTPFPCGIFHKVQVNLCRWIHQQSTEGDADIRLWVNGCKLANRGAELLVLLVNHGQGIEVQVRGLETEKIKCCLLLDSVCSTIENVMATTLPGLLTVKHYLSPQQLREHHEPVMIYQPRDFFRAQTLKETSLTNTMGGYKESFSSIMCFGCHDVYSQASLGMDIHASDLNLLTRRKLSRLLDPPDPLGKDWCLLAMNLGLPDLVAKYNTSNGAPKDFLPSPLHALLREWTTYPESTVGTLMSKLRELGRRDAADFLLKASSVFKINLDGNGQEAYASSCNSGTSYNSISSVVSR

SEQ ID NO: 28625 - protein, 182 aa, Artificial Sequence
  Synthetic polypeptide
RENERLEILFNEILDQNFPNITTNLDIQMQEAQRSPNRYNAKSSSPQHVIIKPLKVKAKANILKRAKENLLITHKGTTIRLTVDFSADTLQARREGDDIFKVLKEKYCHPRRPCPAKLFFINKRKIKPFPGPDPWKVACQVVRSGMHQLLQVLQQKRCLELWSVDVGSILLWAEAISRDERK

SEQ ID NO: 28626 - protein, 182 aa, Artificial Sequence; identical to SEQ ID NO: 28625
  Synthetic polypeptide

SEQ ID NO: 28627 - protein, 182 aa, Artificial Sequence; identical to SEQ ID NO: 28625
  Synthetic polypeptide

SEQ ID NO: 28628 - protein, 182 aa, Artificial Sequence; identical to SEQ ID NO: 28625
  Synthetic polypeptide

SEQ ID NO: 28629 - protein, 112 aa, Artificial Sequence
  Synthetic polypeptide
SLSQAQTHGKWPVKWYAPECINYYKFSSKSDVWSFGVLMWEAFSYGQKPYRGMKGSEVTAMLEKGERMGCPAGCPREMYDLMNLCWTYDVENRPGFAAVELRLRNYYYDVVN

SEQ ID NO: 28630 - protein, 112 aa, Artificial Sequence; identical to SEQ ID NO: 28629
  Synthetic polypeptide

SEQ ID NO: 28631 - protein, 112 aa, Artificial Sequence; identical to SEQ ID NO: 28629
  Synthetic polypeptide

SEQ ID NO: 28632 - protein, 112 aa, Artificial Sequence; identical to SEQ ID NO: 28629
  Synthetic polypeptide

SEQ ID NO: 28633 - protein, 41 aa, Artificial Sequence
  Synthetic polypeptide
KKNKAFPRPRPMESGLSSGTLRNASTTTSSPAKAMSGALEC

SEQ ID NO: 28634 - protein, 41 aa, Artificial Sequence; identical to SEQ ID NO: 28633
  Synthetic polypeptide

SEQ ID NO: 28635 - protein, 41 aa, Artificial Sequence; identical to SEQ ID NO: 28633
  Synthetic polypeptide

SEQ ID NO: 28636 - protein, 41 aa, Artificial Sequence; identical to SEQ ID NO: 28633
  Synthetic polypeptide

SEQ ID NO: 28637 - protein, 65 aa, Artificial Sequence
  Synthetic polypeptide
EVPCASHHDSEASTAMWNWMITTRMGSASLTGELPVHASLATGPFMWTRFRCRGRLKTESQRPSP

SEQ ID NO: 28638 - protein, 65 aa, Artificial Sequence; identical to SEQ ID NO: 28637
  Synthetic polypeptide

SEQ ID NO: 28639 - protein, 46 aa, Artificial Sequence
  Synthetic polypeptide
VSRGLMGLSGVSTFASSSFFSCRCQCKKCLVPPTMILRPPQPCGTG

SEQ ID NO: 28640 - protein, 46 aa, Artificial Sequence; identical to SEQ ID NO: 28639
  Synthetic polypeptide

SEQ ID NO: 28641 - protein, 687 aa, Artificial Sequence
  Synthetic polypeptide
GLHSHVELDDYHEDGFCQPYRGIACARFIGNRTIYVDSLQMQGEIENRITAAFTMIGTSTHLSDQCSQFAIPSFCHFVFPLCDARSRTPKPRELCRDECEVLESDLCRQEYTIARSNPLILMRLQLPKCEALPMPESPDAANCMRIGIPAERLGRYHQCYNGSGMDYRGTASTTKSGHQCQPWALQHPHSHHLSSTDFPELGGGHAYCRNPGGQMEGPWCFTQNKNVRMELCDVPSCSPRDSSKMGILYILVPSIAIPLVIACLFFLVCMCRNKQKASASTPQRRQLMASPSQDMEMPLINQHKQAKLKEISLSAVRFMEELGEDRFGKVYKGHLFGPAPGEQTQAVAIKTLKDKAEGPLREEFRHEAMLRARLQHPNVVCLLGVVTKDQPLSMIFSYCSHGDLHEFLVMRSPHSDVGSTDDDRTVKSALEPPDFVHLVAQIAAGMEYLSSHHVVHKDLATRNVLVYDKLNVKISDLGLFREVYAADYYKLLGNSLLPIRWMAPEAIMYGKFSIDSDIWSYGVVLWEVFSYGLQPYCGYSNQDVVEMIRNRQVLPCPDDCPAWVYALMIECWNEFPSRRPRFKDIHSRLRAWGNLSNYNSSAQTSGASNTTQTSSLSTSPVSNVVRMRGSGRQCWMTETPNALLWHNVSGVGSCRWVRGLADFKDEATDFRVMPRDPSLHCHVTSTA

SEQ ID NO: 28642 - protein, 786 aa, Artificial Sequence
  Synthetic polypeptide
GLHSHVELDDYHEDGFCQPYRGIACARFIGNRTIYVDSLQMQGEIENRITAAFTMIGTSTHLSDQCSQFAIPSFCHFVFPLCDARSRTPKPRELCRDECEVLESDLCRQEYTIARSNPLILMRLQLPKCEALPMPESPDAANCMRIGIPAERLGRYHQCYNGSGMDYRGTASTTKSGHQCQPWALQHPHSHHLSSTDFPELGGGHAYCRNPGGQMEGPWCFTQNKNVRMELCDVPSCSPRDSSKMGILYILVPSIAIPLVIACLFFLVCMCRNKQKASASTPQRRQLMASPSQDMEMPLINQHKQAKLKEISLSAVRFMEELGEDRFGKVYKGHLFGPAPGEQTQAVAIKTLKDKAEGPLREEFRHEAMLRARLQHPNVVCLLGVVTKDQPLSMIFSYCSHGDLHEFLVMRSPHSDVGSTDDDRTVKSALEPPDFVHLVAQIAAGMEYLSSHHVVHKDLATRNVLVYDKLNVKISDLGLFREVYAADYYKLLGNSLLPIRWMAPEAIMYGKFSIDSDIWSYGVVLWEVFSYGLQPYCGYSNQDVVEMIRNRQVLPCPDDCPAWVYALMIECWNEFPSRRPRFKDIHSRLRAWGNLSNYNSSAQTSGASNTTQTSSLSTSPVSNVSNARYVGPKQKAPPFPQPQFIPMKGQIRPMVPPPQLYVPVNGYQPVPAYGAYLPNFYPVQIPMQMAPQQVPPQMVPKPSSHHSGSGSTSTGYVTTAPSNTSMADRAALLSEGADDTQNAPEDGAQSTVQEAEEEEEGSVPETELLGDCDTLQVDEAQVQLEA

SEQ ID NO: 28643 - protein, 348 aa, Artificial Sequence
  Synthetic polypeptide
GWTWWLIPVIPALWEAEFNSMILYCVPKLRLMGQKFSVREKMDISGLQVQDIVKPNTAHTFIITGRKRSLELQTRTEEEKKEWIQIIQATIEKHKQNSETFKAFGGAFSQDEDPSLSPDMPITSTSPVEPVVTTEGSSGAAGLEPRKLSSKTRRDKEKQSCKSCGETFNSITKRRHHCKLCGAVICGKCSEFKAENSRQSRVCRDCFLTQPVAPESTEKTPTADPQPSLLCGPLRLSESGETWSEVWAAIPMSDPQVLHLQGGSQDGRLPRTIPLPSCKLSVPDPEERLDSGHVWKLQWAKQSWYLSASSAELQQQWLETLSTAAHGDTAQDSPGALQLQVPMGAAAP

SEQ ID NO: 28644 - protein, 348 aa, Artificial Sequence; identical to SEQ ID NO: 28643
  Synthetic polypeptide

SEQ ID NO: 28645 - protein, 11 aa, Artificial Sequence
  Synthetic polypeptide
SQHFGRLSSTA

SEQ ID NO: 28646 - protein, 11 aa, Artificial Sequence
  Synthetic polypeptide
SQHFGRLSSTA

SEQ ID NO: 28647 - protein, 11 aa, Artificial Sequence
  Synthetic polypeptide
SQHFGRLSSTA

SEQ ID NO: 28648 - protein, 11 aa, Artificial Sequence
  Synthetic polypeptide
SQHFGRLSSTA

SEQ ID NO: 28649 - protein, 347 aa, Artificial Sequence
  Synthetic polypeptide
GWTWWLIPVIPALWEAEFNSMILYCVPKLRLMGQKFSVREKMDISGLQVQDIVKPNTAHTFIITGRKRSLELQTRTEEEKKEWIQIIQATIEKHKQNSETFKAFGGAFSQDEDPSLSPDMPITSTSPVEPVVTTEGSSGAAGLEPRKLSSKTRRDKEKQSCKSCGETFNSITKRRHHCKLCGAVICGKCSEFKAENSRQSRVCRDCFLTQPVAPESTETPTADPQPSLLCGPLRLSESGETWSEVWAAIPMSDPQVLHLQGGSQDGRLPRTIPLPSCKLSVPDPEERLDSGHVWKLQWAKQSWYLSASSAELQQQWLETLSTAAHGDTAQDSPGALQLQVPMGAAAP

SEQ ID NO: 28650 - protein, 257 aa, Artificial Sequence
  Synthetic polypeptide
GWTWWLIPVIPALWEAEFNSMILYCVPKLRLMGQKFSVREKMDISGLQVQDIVKPNTAHTFIITGRKRSLELQTRTEEEKKEWIQIIQATIEKHKQNSETFKAFGGAFSQDEDPSLSPDMPITSTSPVEPVVTTEGSSGAAGLEPRKLSSKTRRDKEKQSCKSCGETFNSITKRRHHCKLCGAVICGKCSEFKAENSRQSRVCRDCFLTQPVAPESTEVGAPSSCSPPGGAAEPPDTCSCAPAAPAASAFGVSLGPG

SEQ ID NO: 28651 - protein, 97 aa, Artificial Sequence
  Synthetic polypeptide
SEDCSSAHPFKLLRLPESGCVPLSPGPGDHGESTSKLASVTRSVDKDPGIPRALSLSGSSSSPQAQVMVHMANPRQPLPASGLATGMPQQPAAYALG

SEQ ID NO: 28652 - protein, 97 aa, Artificial Sequence; identical to SEQ ID NO: 28651
  Synthetic polypeptide

SEQ ID NO: 28653 - protein, 97 aa, Artificial Sequence; identical to SEQ ID NO: 28651
  Synthetic polypeptide

SEQ ID NO: 28654 - protein, 26 aa, Artificial Sequence
  Synthetic polypeptide
GYLSPGVCLSRQAQETMVRAPASWPV

SEQ ID NO: 28655 - protein, 26 aa, Artificial Sequence
  Synthetic polypeptide
GYLSPGVCLSRQAQETMVRAPASWPV

SEQ ID NO: 28656 - protein, 26 aa, Artificial Sequence
  Synthetic polypeptide
GYLSPGVCLSRQAQETMVRAPASWPV

SEQ ID NO: 28657 - protein, 26 aa, Artificial Sequence
  Synthetic polypeptide
GYLSPGVCLSRQAQETMVRAPASWPV

SEQ ID NO: 28658 - protein, 14 aa, Artificial Sequence
  Synthetic polypeptide
VRVCASLARPRRPW

SEQ ID NO: 28659 - protein, 14 aa, Artificial Sequence
  Synthetic polypeptide
VRVCASLARPRRPW

SEQ ID NO: 28660 - protein, 14 aa, Artificial Sequence
  Synthetic polypeptide
VRVCASLARPRRPW

SEQ ID NO: 28661 - protein, 14 aa, Artificial Sequence
  Synthetic polypeptide
VRVCASLARPRRPW

SEQ ID NO: 28662 - protein, 71 aa, Artificial Sequence
  Synthetic polypeptide
SEDCSSAHPFKLLRLPESGCVPLSPGPGDHGESTSKLASVTRSVDKDPGIPRALSLSGSSSSPQAQVMVHM

SEQ ID NO: 28663 - protein, 39 aa, Artificial Sequence
  Synthetic polypeptide
GRGAGGGVAGASRCRGSVAPGRSAGLRGKCAPRSRNGLE

SEQ ID NO: 28664 - protein, 39 aa, Artificial Sequence; identical to SEQ ID NO: 28663
  Synthetic polypeptide

SEQ ID NO: 28665 - protein, 39 aa, Artificial Sequence; identical to SEQ ID NO: 28663
  Synthetic polypeptide

SEQ ID NO: 28666 - protein, 39 aa, Artificial Sequence; identical to SEQ ID NO: 28663
  Synthetic polypeptide

SEQ ID NO: 28667 - protein, 39 aa, Artificial Sequence; identical to SEQ ID NO: 28663
  Synthetic polypeptide

SEQ ID NO: 28668 - protein, 39 aa, Artificial Sequence; identical to SEQ ID NO: 28663
  Synthetic polypeptide

SEQ ID NO: 28669 - protein, 39 aa, Artificial Sequence; identical to SEQ ID NO: 28663
  Synthetic polypeptide

SEQ ID NO: 28670 - protein, 39 aa, Artificial Sequence; identical to SEQ ID NO: 28663
  Synthetic polypeptide

SEQ ID NO: 28671 - protein, 55 aa, Artificial Sequence
  Synthetic polypeptide
GAEPGEGWRGQAAAEGASRRGGVRACAASARRGHEMDWSEPETPKTEAQGEGRGV

SEQ ID NO: 28672 - protein, 55 aa, Artificial Sequence; identical to SEQ ID NO: 28671
  Synthetic polypeptide

SEQ ID NO: 28673 - protein, 55 aa, Artificial Sequence; identical to SEQ ID NO: 28671
  Synthetic polypeptide

SEQ ID NO: 28674 - protein, 55 aa, Artificial Sequence; identical to SEQ ID NO: 28671
  Synthetic polypeptide

SEQ ID NO: 28675 - protein, 55 aa, Artificial Sequence; identical to SEQ ID NO: 28671
  Synthetic polypeptide

SEQ ID NO: 28676 - protein, 55 aa, Artificial Sequence; identical to SEQ ID NO: 28671
  Synthetic polypeptide

SEQ ID NO: 28677 - protein, 55 aa, Artificial Sequence; identical to SEQ ID NO: 28671
  Synthetic polypeptide

SEQ ID NO: 28678 - protein, 55 aa, Artificial Sequence; identical to SEQ ID NO: 28671
  Synthetic polypeptide

SEQ ID NO: 28679 - protein, 171 aa, Artificial Sequence
  Synthetic polypeptide
ARSRGRGGGGKPLQRERRAGAECGLARQVRAEVTKWIGVNRRPRKRKRREKEEVFEKLLPDQLVLLLEHLLEQKTLSPRTLQSLQRTYHLQDQDAEVRHRWCELIVKHKFTKAYKSVERFLQEDQAMGVYLYGELMVSEDARQQQLARRCFERTKEQMDRSSAQVVAEMLF

SEQ ID NO: 28680 - protein, 171 aa, Artificial Sequence; identical to SEQ ID NO: 28679
  Synthetic polypeptide

SEQ ID NO: 28681 - protein, 171 aa, Artificial Sequence; identical to SEQ ID NO: 28679
  Synthetic polypeptide

SEQ ID NO: 28682 - protein, 171 aa, Artificial Sequence; identical to SEQ ID NO: 28679
  Synthetic polypeptide

SEQ ID NO: 28683 - protein, 171 aa, Artificial Sequence; identical to SEQ ID NO: 28679
  Synthetic polypeptide

SEQ ID NO: 28684 - protein, 171 aa, Artificial Sequence; identical to SEQ ID NO: 28679
  Synthetic polypeptide

SEQ ID NO: 28685 - protein, 136 aa, Artificial Sequence
  Synthetic polypeptide
ARSRGRGGGGKPLQRERRAGAECGLARQVRAEVTKWIGVNRRPRKRKRREKEEVFEKLLPDQLVLLLEHLLEQKTLSPRTLQSLQRTYHLQDQDAEVRHRWCELIVKHKFTKAYKSVERFLQEDQVGVIFQQMGIL

SEQ ID NO: 28686 - protein, 97 aa, Artificial Sequence
  Synthetic polypeptide
ARSRGRGGGGKPLQRERRAGAECGLARQVRAEVTKWIGVNRRPRKRKRREKEEVFEKTLNWSHLRNRERRRKKWITFKTLGGILFTVKQMRNLFAQV

SEQ ID NO: 28687 - protein, 324 aa, Artificial Sequence
  Synthetic polypeptide
GGPHSKEQRRSNRILQQTSDWAAVSPGLLVCLACLAKCVRFSRCVLLNYWKVLPKSFLRSMGQWAVITGAGDGIGKAYSFELAKRGLNVVLISRTLEKLEAIATEIERTTGRSVKIIQADFTKDDIYEHIKEKLAGLEIGILVNNVGMLPNLLPSHFLNAPDEIQSLIHCNITSVVKMTQLILKHMESRQKGLILNISSGIALFPWPLYSMYSASKAFVCAFSKALQEEYKAKEVIIQVLTPYAVSTAMTKYLNTNVITKTADEFVKESLNYVTIGGETCGCLAHEILAGFLSLIPAWAFYSGAFQRLLLTHYVAYLKLNTKVR

SEQ ID NO: 28688 - protein, 57 aa, Artificial Sequence
  Synthetic polypeptide
FFSLARSDEASCSWELPCEEAHTARNKGGATGSCNKQVTGLLFPQGCWCAWPAWRSA

SEQ ID NO: 28689 - protein, 57 aa, Artificial Sequence; identical to SEQ ID NO: 28688
  Synthetic polypeptide

SEQ ID NO: 28690 - protein, 72 aa, Artificial Sequence
  Synthetic polypeptide
LGCCFPRAAGVPGLPGEVREILQMCFTELLESFAKVFLAVNGTVGSDHWSRRWNWESVLVRASKTWTQCCPY

SEQ ID NO: 28691 - protein, 72 aa, Artificial Sequence; identical to SEQ ID NO: 28690
  Synthetic polypeptide

SEQ ID NO: 28692 - protein, 274 aa, Artificial Sequence
  Synthetic polypeptide
GGPHSKEQRRSNRILQQTSDWAAVSPGLLVCLACLAKCVRFSRCVLLNYWKVLPKSFLRSMGQWAVITGAGDGIGKAYSFELAKRGLNVVLISRTLEKLEAIATEIERTTGRSVKIIQADFTKDDIYEHIKEKLAGLEIGILVNNVGMLPNLLPSHFLNAPDEIQSLIHCNITSVVKMTQLILKHMESRQKGLILNISSGIALFPWPLYSMYSASKAFVCAFSKALQEEYKAKEVIIQAGFLSLIPAWAFYSGAFQRLLLTHYVAYLKLNTKVR

SEQ ID NO: 28693 - protein, 19 aa, Artificial Sequence
  Synthetic polypeptide
KWPYCPSQHWPVPERLLSA

SEQ ID NO: 28694 - protein, 19 aa, Artificial Sequence
  Synthetic polypeptide
KWPYCPSQHWPVPERLLSA

SEQ ID NO: 28695 - protein, 19 aa, Artificial Sequence
  Synthetic polypeptide
KWPYCPSQHWPVPERLLSA

SEQ ID NO: 28696 - protein, 79 aa, Artificial Sequence
  Synthetic polypeptide
TPIHNCFKENKIPRNPTYKGCEGPLQGELQTAAQGNKRGYKQMEEHSILMDRKNQYRENGHTAQVNIGLCPSVCSLLEF

SEQ ID NO: 28697 - protein, 79 aa, Artificial Sequence; identical to SEQ ID NO: 28696
  Synthetic polypeptide

SEQ ID NO: 28698 - protein, 79 aa, Artificial Sequence; identical to SEQ ID NO: 28696
  Synthetic polypeptide

SEQ ID NO: 28699 - protein, 853 aa, Artificial Sequence
  Synthetic polypeptide
QGGTGTILLKLFQSIEKEGILPNSFYEASIILIPKPGRDTTKKENFRPISLMNIDAKILNKILANRIQQHIKKLIHHDQVGFIPGMQGWFNIHKSINVIQHINRAKDKNHMIISIDAEKAFDKIQQPFMLKTLNKLGIDGTYFKIIRAIYDKPTANIILNGQKLEAFPLKTGTRQGCPLSPLLFNIVLEVLARAIRQEKEIKGIQLGKEEVKLSLFADDMIVYLENPIVSAQNLLKLISNFSKVSGYKINVQKSQAFLYTNNRQTESQIMSELPFTIASKRIKYLGIQLTRDVKDLFKENYKPLLKEIKEDTNKWKNIPYSWIGRINIVKMAILPKSTLACARASALCLNFNSTLILLPVCRNLLSFLRGTCSFCSRTLRKQLDHNLTFHKLVAYMICLHTAIHIIAHLFNFDCYSRSRQATDGSLASILSSLSHDEKKGGSWLNPIQSRNTTVEYVTFTSIAGLTGVIMTIALILMVTSATEFIRRSYFEVFWYTHHLFIFYILGLGIHGIGGIVRGQTEESMNESHPRKCAESFEMWDDRDSHCRRPKFEGHPPESWKWILAPVILYICERILRFYRSQQKVVITKVVMHPSKVLELQMNKRGFSMEVGQYIFVNCPSISLLEWHPFTLTSAPEEDFFSIHIRAAGDWTENLIRAFEQQYSPIPRIEVDGPFGTASEDVFQYEVAVLVGAGIGVTPFASILKSIWYKFQCADHNLKTKKIYFYWICRETGAFSWFNNLLTSLEQEMEELGKVGFLNYRLFLTGWDSNIVGHAALNFDKATDIVTGLKQKTSFGRPMWDNEFSTIATSHPKSVVGVFLCGPRTLAKSLRKCCHRYSSLDPRKVQFYFNKENF

SEQ ID NO: 28700 - protein, 481 aa, Artificial Sequence
  Synthetic polypeptide
QGGTGTILLKLFQSIEKEGILPNSFYEASIILIPKPGRDTTKKENFRPISLMNIDAKILNKILANRIQQHIKKLIHHDQVGFIPGMQGWFNIHKSINVIQHINRAKDKNHMIISIDAEKAFDKIQQPFMLKTLNKLGIDGTYFKIIRAIYDKPTANIILNGQKLEAFPLKTGTRQGCPLSPLLFNIVLEVLARAIRQEKEIKGIQLGKEEVKLSLFADDMIVYLENPIVSAQNLLKLISNFSKVSGYKINVQKSQAFLYTNNRQTESQIMSELPFTIASKRIKYLGIQLTRDVKDLFKENYKPLLKEIKEDTNKWKNIPYSWIGRINIVKMAILPKSTLACARASALCLNFNSTLILLPVCRNLLSFLRGTCSFCSRTLRKQLDHNLTFHKLVAYMICLHTAIHIIAHLFNFDCYSRSRQATDGSLASILSSLSHDEKKGGSWLNPIHPHITPTVYMFTVTFDMVLSSVNSNLFLFLLIKK

SEQ ID NO: 28701 - protein, 804 aa, Artificial Sequence
  Synthetic polypeptide
QGGTGTILLKLFQSIEKEGILPNSFYEASIILIPKPGRDTTKKENFRPISLMNIDAKILNKILANRIQQHIKKLIHHDQVGFIPGMQGWFNIHKSINVIQHINRAKDKNHMIISIDAEKAFDKIQQPFMLKTLNKLGIDGTYFKIIRAIYDKPTANIILNGQKLEAFPLKTGTRQGCPLSPLLFNIVLEVLARAIRQEKEIKGIQLGKEEVKLSLFADDMIVYLENPIVSAQNLLKLISNFSKVSGYKINVQKSQAFLYTNNRQTESQIMSELPFTIASKRIKYLGIQLTRDVKDLFKENYKPLLKEIKEDTNKWKNIPYSWIGRINIVKMAILPKSTLACARASALCLNFNSTLILLPVCRNLLSFLRGTCSFCSRTLRKQLDHNLTFHKLVAYMICLHTAIHIIAHLFNFDCYSRSRQATDGSLASILSSLSHDEKKGGSWLNPIQSRNTTVEYVTFTSIAGLTGVIMTIALILMVTSATEFIRRSYFEVFWYTHHLFIFYILGLGIHGIGGIVRGQTEESMNESHPRKCAESFEMWDDRDSHCRRPKFEGHPPESWKWILAPVILYICERILRFYRSQQKVVITKVVMHPSKVLELQMNKRGFSMEVGQYIFVNCPSISLLEWHPFTLTSAPEEDFFSIHIRAAGDWTENLIRAFEQQYSPIPRIEVDGPFGTASEDVFQYEVAVLVGAGIGVTPFASILKSIWYKFQCADHNLKTKKVGHAALNFDKATDIVTGLKQKTSFGRPMWDNEFSTIATSHPKSVVGVFLCGPRTLAKSLRKCCHRYSSLDPRKVQFYFNKENF

SEQ ID NO: 28702 - protein, 97 aa, Artificial Sequence
  Synthetic polypeptide
NSSSPKIFKGPGSLTLKSQTKRHICRQFFSNYFKIALCPFILHHINLFNFLLRAPHYLEVFVDLLPCLPTRVPIIQKSDSTAITGEILLTLMIPGKV

SEQ ID NO: 28703 - protein, 53 aa, Artificial Sequence
  Synthetic polypeptide
PSVHSFFITLTCLIFFSELHTIWKYLLTCYHVSPLESQLYRNPTVLQSLAKFC

SEQ ID NO: 28704 - protein, 217 aa, Artificial Sequence
  Synthetic polypeptide
SPNYTEIRQYCNHWRNFADIDDSWKSIKSILDWTSFNQERIVDVAGPGGWNDPDMLVIGNFGLSWNQQVTQMALWAIMAAPLFMSNDLRHISPQAKALLQDKDVIAINQDPLGKQGYQLRQGDNFEVWERPLSGLAWAVAMINRQEIGGPRSYTIAVASLGKGVACNPACFITQLLPVKRKLGFYEWTSRLRSHINPTGTVLLQLENTMQMSLKDLL

SEQ ID NO: 28705 - protein, 44 aa, Artificial Sequence
  Synthetic polypeptide
RRSQDGRIGTAPVYSSQRERRRRRVISAFPSENFTVCHTATEKV

SEQ ID NO: 28706 - protein, 18 aa, Artificial Sequence
  Synthetic polypeptide
FLHFHLRTSLYAIQQQRK

SEQ ID NO: 28707 - protein, 151 aa, Artificial Sequence
  Synthetic polypeptide
AKIAPLHSTLGAVDIVAIMIGNLKGTKILQSIQRGIQVTMVIEVGKKHGPWVNHYSIFFVSVSFFIITAATVGYFIFYSARRLRNARAQSRKQRQLKADAKKAIGRLQLRTLKQGDKEIGPDGDSCAVCIELYKPNDLVRILTCNHIFHKT

SEQ ID NO: 28708 - protein, 34 aa, Artificial Sequence
  Synthetic polypeptide
CQLLGRLKQENHLNPGGRGCSEPRLHHCTPLWVQ

SEQ ID NO: 28709 - protein, 34 aa, Artificial Sequence; identical to SEQ ID NO: 28708
  Synthetic polypeptide

SEQ ID NO: 28710 - protein, 34 aa, Artificial Sequence; identical to SEQ ID NO: 28708
  Synthetic polypeptide

SEQ ID NO: 28711 - protein, 108 aa, Artificial Sequence
  Synthetic polypeptide
TQEAEVAVSQDCTTALHSGCSRHCCNHDRQSERHKNSAIYSKRHTSDNGHRSREKTWPLGESLFNFFRFCVLFYYYGGNCGLFYLLFCSKATECKSSKQEAEAIKGRC

SEQ ID NO: 28712 - protein, 108 aa, Artificial Sequence; identical to SEQ ID NO: 28711
  Synthetic polypeptide

SEQ ID NO: 28713 - protein, 108 aa, Artificial Sequence; identical to SEQ ID NO: 28711
  Synthetic polypeptide

SEQ ID NO: 28714 - protein, 277 aa, Artificial Sequence
  Synthetic polypeptide
AKIAPLHSTLGAVDIVAIMIGNLKGTKILQSIQRGIQVTMVIEVGKKHGPWVNHYSIFFVSVSFFIITAATVGYFIFYSARRLRNARAQSRKQRQLKADAKKAIGRLQLRTLKQGDKEIGPDGDSCAVCIELYKPNDLVRILTCNHIFHKTCVDPWLLEHRTCPMCKCDILKALGIEVDVEDGSVSLQVPVSNEISNSASSHEEDNRSETASSGYASVQGTDEPPLEEHVQSTNESLQLVNHEANSVAVDVIPHVDNPTFEEDETPNQETAVREIKS

SEQ ID NO: 28715 - protein, 277 aa, Artificial Sequence; identical to SEQ ID NO: 28714
  Synthetic polypeptide

SEQ ID NO: 28716 - protein, 419 aa, Artificial Sequence
  Synthetic polypeptide
MIVLCFLYSLQNCQVSVVQVTIPDGFVNVTVGSNVTLICIYTTTVASREQLSIQWSFFHKKEMEPISHSSCLSTEGMEEKAVSQCLKMTHARDARGRCSWTSEIYFSQGGQAVAIGQFKDRITGSNDPGNASITISHMQPADSGIYICDVNNPPDFLGQNQGILNVSVLVKPSKPLCSVQGRPETGHTISLSCLSALGTPSPVYYWHKLEGRDIVPVKENFNPTTGILVIGNLTNFEQGYYQCTAINRLGNSSCEIDLTSSHPEVGIIVGALIGSLVGAAIIISVVCFARNKAKAKAKERNSKTIAELEPMTKINPRGESEAMPREDATQLEVTLPSSIHETGPDTIQEPDYEPKPTQEPAPEPAPGSEPMAVPDLDIELELEPETQSELEPEPEPEPESEPGVVVEPLSEDEKGVVKA

SEQ ID NO: 28717 - protein, 17 aa, Artificial Sequence
  Synthetic polypeptide
CYASCTACRTVRLVWCK

SEQ ID NO: 28718 - protein, 17 aa, Artificial Sequence
  Synthetic polypeptide
CYASCTACRTVRLVWCK

SEQ ID NO: 28719 - protein, 17 aa, Artificial Sequence
  Synthetic polypeptide
CYASCTACRTVRLVWCK

SEQ ID NO: 28720 - protein, 53 aa, Artificial Sequence
  Synthetic polypeptide
KAWHLHPSLFLPLSPCDTSAPTSPSAMSKSFLRLSPEVDDSAMLLVQPAELSG

SEQ ID NO: 28721 - protein, 53 aa, Artificial Sequence; identical to SEQ ID NO: 28720
  Synthetic polypeptide

SEQ ID NO: 28722 - protein, 53 aa, Artificial Sequence; identical to SEQ ID NO: 28720
  Synthetic polypeptide

SEQ ID NO: 28723 - protein, 383 aa, Artificial Sequence
  Synthetic polypeptide
MIVLCFLYSLQNCQVSVVQVTIPDGFVNVTVGSNVTLICIYTTTVASREQLSIQWSFFHKKEMEPISIYFSQGGQAVAIGQFKDRITGSNDPGNASITISHMQPADSGIYICDVNNPPDFLGQNQGILNVSVLVKPSKPLCSVQGRPETGHTISLSCLSALGTPSPVYYWHKLEGRDIVPVKENFNPTTGILVIGNLTNFEQGYYQCTAINRLGNSSCEIDLTSSHPEVGIIVGALIGSLVGAAIIISVVCFARNKAKAKAKERNSKTIAELEPMTKINPRGESEAMPREDATQLEVTLPSSIHETGPDTIQEPDYEPKPTQEPAPEPAPGSEPMAVPDLDIELELEPETQSELEPEPEPEPESEPGVVVEPLSEDEKGVVKA

SEQ ID NO: 28724 - protein, 164 aa, Artificial Sequence
  Synthetic polypeptide
MIVLCFLYSLQNCQVSVVQVTIPDGFVNVTVGSNVTLICIYTTTVASREQLSIQWSFFHKKEMEPISHSSCLSTEGMEEKAVSQCLKMTHARDARGRCSWTSEIYFSQGGQAVAIGQFKDRITGSNDPGNASITISHMQPADSGIYICDVNNPPDFLGQNQGIL

SEQ ID NO: 28725 - protein, 64 aa, Artificial Sequence
  Synthetic polypeptide
TLEIMQETTRVELWKVVRRRQTGLRPREKQRARVSYVSHPAEERNLVLAIPDTQLNNRGQPRSG

SEQ ID NO: 28726 - protein, 64 aa, Artificial Sequence; identical to SEQ ID NO: 28725
  Synthetic polypeptide

SEQ ID NO: 28727 - protein, 64 aa, Artificial Sequence; identical to SEQ ID NO: 28725
  Synthetic polypeptide

SEQ ID NO: 28728 - protein, 413 aa, Artificial Sequence
  Synthetic polypeptide
TTEGSPGQVSVVQVTIPDGFVNVTVGSNVTLICIYTTTVASREQLSIQWSFFHKKEMEPISHSSCLSTEGMEEKAVSQCLKMTHARDARGRCSWTSEIYFSQGGQAVAIGQFKDRITGSNDPGNASITISHMQPADSGIYICDVNNPPDFLGQNQGILNVSVLVKPSKPLCSVQGRPETGHTISLSCLSALGTPSPVYYWHKLEGRDIVPVKENFNPTTGILVIGNLTNFEQGYYQCTAINRLGNSSCEIDLTSSHPEVGIIVGALIGSLVGAAIIISVVCFARNKAKAKAKERNSKTIAELEPMTKINPRGESEAMPREDATQLEVTLPSSIHETGPDTIQEPDYEPKPTQEPAPEPAPGSEPMAVPDLDIELELEPETQSELEPEPEPEPESEPGVVVEPLSEDEKGVVKA

SEQ ID NO: 28729 - protein, 17 aa, Artificial Sequence
  Synthetic polypeptide
YPTEQQRAAQVRLVWCK

SEQ ID NO: 28730 - protein, 17 aa, Artificial Sequence
  Synthetic polypeptide
YPTEQQRAAQVRLVWCK

SEQ ID NO: 28731 - protein, 17 aa, Artificial Sequence
  Synthetic polypeptide
YPTEQQRAAQVRLVWCK

SEQ ID NO: 28732 - protein, 377 aa, Artificial Sequence
  Synthetic polypeptide
TTEGSPGQVSVVQVTIPDGFVNVTVGSNVTLICIYTTTVASREQLSIQWSFFHKKEMEPISIYFSQGGQAVAIGQFKDRITGSNDPGNASITISHMQPADSGIYICDVNNPPDFLGQNQGILNVSVLVKPSKPLCSVQGRPETGHTISLSCLSALGTPSPVYYWHKLEGRDIVPVKENFNPTTGILVIGNLTNFEQGYYQCTAINRLGNSSCEIDLTSSHPEVGIIVGALIGSLVGAAIIISVVCFARNKAKAKAKERNSKTIAELEPMTKINPRGESEAMPREDATQLEVTLPSSIHETGPDTIQEPDYEPKPTQEPAPEPAPGSEPMAVPDLDIELELEPETQSELEPEPEPEPESEPGVVVEPLSEDEKGVVKA

SEQ ID NO: 28733 - protein, 158 aa, Artificial Sequence
  Synthetic polypeptide
TTEGSPGQVSVVQVTIPDGFVNVTVGSNVTLICIYTTTVASREQLSIQWSFFHKKEMEPISHSSCLSTEGMEEKAVSQCLKMTHARDARGRCSWTSEIYFSQGGQAVAIGQFKDRITGSNDPGNASITISHMQPADSGIYICDVNNPPDFLGQNQGIL

SEQ ID NO: 28734 - protein, 19 aa, Artificial Sequence
  Synthetic polypeptide
ETFCIQTLLTQKNLSCCLI

SEQ ID NO: 28735 - protein, 19 aa, Artificial Sequence
  Synthetic polypeptide
ETFCIQTLLTQKNLSCCLI

SEQ ID NO: 28736 - protein, 19 aa, Artificial Sequence
  Synthetic polypeptide
ETFCIQTLLTQKNLSCCLI

SEQ ID NO: 28737 - protein, 4 aa, Artificial Sequence
  Synthetic polypeptide
LRKI

SEQ ID NO: 28738 - protein, 4 aa, Artificial Sequence
  Synthetic polypeptide
LRKI

SEQ ID NO: 28739 - protein, 4 aa, Artificial Sequence
  Synthetic polypeptide
LRKI

SEQ ID NO: 28740 - protein, 309 aa, Artificial Sequence
  Synthetic polypeptide
QLGDLLYSDSSNSEKSKLLSDISARLWFTYRRKFSPIGGTGPSSDAGWGCMLRCGQMMLAQALICRHLGRDWSWEKQKEQPKEYQRILQCFLDRKDCCYSIHQMAQMGVGEGKSIGEWFGPNTVAQVLKKLALFDEWNSLAVYVSMDNTVVIEDIKKMCRVLPLSADTAGDRPPDSLTASNQSDELIFLDPHTTQTFVDTEENGTVNDQTFHCLQSPQRMNILNLDPSVALGFFCKEEKDFDNWCSLVQKEILKENLRMFELVQKHPSHWPPFVPPAKPEVTTTGAEFIDSTEQLEEFDLEEDFEILSV

SEQ ID NO: 28741 - protein, 371 aa, Artificial Sequence
  Synthetic polypeptide
QLGDLLYSDSSNSEKSKLLSDISARLWFTYRRKFSPIGGTGPSSDAGWGCMLRCGQMMLAQALICRHLGRDWSWEKQKEQPKEYQRILQCFLDRKDCCYSIHQMAQMGVGEGKSIGEWFGPNTVAQVLKKLALFDEWNSLAVYVSMDNTVVIEDIKKMCRVLPLSADTAGDRPPDSLTASNQSKGTSAYCSAWKPLLLIVPLRLGINQINPVYVDAFKECFKMPQSLGALGGKPNNAYYFIGFLGDELIFLDPHTTQTFVDTEENGTVNDQTFHCLQSPQRMNILNLDPSVALGFFCKEEKDFDNWCSLVQKEILKENLRMFELVQKHPSHWPPFVPPAKPEVTTTGAEFIDSTEQLEEFDLEEDFEILSV

SEQ ID NO: 28742 - protein, 204 aa, Artificial Sequence
  Synthetic polypeptide
QLGDLLYSDSSNSEKSKLLSDISARLWFTYRRKFSPIGGTGPSSDAGWGCMLRCGQMMLAQALICRHLGRDWSWEKQKEQPKEYQRILQCFLDRKDCCYSIHQMEKMCRVLPLSADTAGDRPPDSLTASNQSKGTSAYCSAWKPLLLIVPLRLGINQINPVYVDAFKVTSSSSWTLIQPRPLLTLKRMERLMTRLSIACSPHSE

SEQ ID NO: 28743 - protein, 125 aa, Artificial Sequence
  Synthetic polypeptide
CVCALVVCACAVCACLVYVIYQGCVCVVCACALEMGHASEGPYGVFAGRDASRGLATFCLDKEALKDEYDDLSDLTAAQQETLSDWESQFTFKYHHVGKLLKEGEEPTVYSDEEEPKDESARKND

SEQ ID NO: 28744 - protein, 45 aa, Artificial Sequence
  Synthetic polypeptide
FIRGVCVWCVHARLKWVMRQRGRMGSLLEEMHPGALPHFAWIRKH

SEQ ID NO: 28745 - protein, 27 aa, Artificial Sequence
  Synthetic polypeptide
NGSCVRGAVWGLCWKRCIQGPCHILPG

SEQ ID NO: 28746 - protein, 76 aa, Artificial Sequence
  Synthetic polypeptide
EVMGTQTLSDADGGSIQSEETKLHLCHRDFAYCVRVNSHSGPCCNHQDPECDCRRLLPRSYSRLWIVPWNHWIKPY

SEQ ID NO: 28747 - protein, 76 aa, Artificial Sequence; identical to SEQ ID NO: 28746
  Synthetic polypeptide

SEQ ID NO: 28748 - protein, 76 aa, Artificial Sequence; identical to SEQ ID NO: 28746
  Synthetic polypeptide

SEQ ID NO: 28749 - protein, 76 aa, Artificial Sequence; identical to SEQ ID NO: 28746
  Synthetic polypeptide

SEQ ID NO: 28750 - protein, 343 aa, Artificial Sequence
  Synthetic polypeptide
RSWEPRHFQMLMVGAFNRRKRNSIYVTVTLLIVSVLILTVGLAATTRTQNVTVGGYYPGVILGFGSFLGIIGSNLIENKRQMLVASIVFISFGVIAAFCCAIVDGVFAARHIDLKPLYANRCHYVPKTSQKEAEEVISSSTKNSPSTRVMRNLTQAAREVNCPHLSREFCTPRIRGNTCFCCDLYNCGNRVEITGGYYEYIDVSSCQDIIHLYHLLWSATILNIVGLFLGIITAAVLGGFKDMNPTLPALNCSVENTHPTVSYYAHPQVASYNTYYHSPPHLPPYSAYDFQHSGVFPSSPPSGLSDEPQSASPSPSYMWSSSAPPRYSPPYYPPFEKPPPYSP

SEQ ID NO: 28751 - protein, 16 aa, Artificial Sequence
  Synthetic polypeptide
WWEHSIGGNETPSMSP

SEQ ID NO: 28752 - protein, 16 aa, Artificial Sequence
  Synthetic polypeptide
WWEHSIGGNETPSMSP

SEQ ID NO: 28753 - protein, 16 aa, Artificial Sequence
  Synthetic polypeptide
WWEHSIGGNETPSMSP

SEQ ID NO: 28754 - protein, 16 aa, Artificial Sequence
  Synthetic polypeptide
WWEHSIGGNETPSMSP

SEQ ID NO: 28755 - protein, 319 aa, Artificial Sequence
  Synthetic polypeptide
RSWEPRHFQMLMVGAFNRRKRNSIYVTVTLLIVSVLILTVGLAATTRTQNVTVGGYYPGVILGFGSFLGIIGSNLIENKRQMLVASIVFISFGVIAAFCCAIVDGVFAARHIDLKPLYANRCHYVPKTSQKEAEEVNCPHLSREFCTPRIRGNTCFCCDLYNCGNRVEITGGYYEYIDVSSCQDIIHLYHLLWSATILNIVGLFLGIITAAVLGGFKDMNPTLPALNCSVENTHPTVSYYAHPQVASYNTYYHSPPHLPPYSAYDFQHSGVFPSSPPSGLSDEPQSASPSPSYMWSSSAPPRYSPPYYPPFEKPPPYSP

SEQ ID NO: 28756 - protein, 235 aa, Artificial Sequence
  Synthetic polypeptide
RSWEPRHFQMLMVGAFNRRKRNSIYVTVTLLIVSVLILTVGLAATTRTQNVTVGGYYPGVILGFGSFLGIIGSNLIENKRQMLVASIVFISFGVIAAFCCAIVDGVFAARHIDLKPLYANRCHYVPKTSQKEAEENPTLPALNCSVENTHPTVSYYAHPQVASYNTYYHSPPHLPPYSAYDFQHSGVFPSSPPSGLSDEPQSASPSPSYMWSSSAPPRYSPPYYPPFEKPPPYSP

SEQ ID NO: 28757 - protein, 143 aa, Artificial Sequence
  Synthetic polypeptide
RSWEPRHFQMLMVGAFNRRKRNSIYVTVTLLIVSVLILTVGLAATTRTQNVTVGGYYPGVILGFGSFLGIIGSNLIENKRQMLVASIVFISFGVIAAFCCAIVDGVFAARHIDLKPLYANRCHYVPKTSQKEAEENPTLPALN

SEQ ID NO: 28758 - protein, 316 aa, Artificial Sequence
  Synthetic polypeptide
EVMGTQTLSDADVGLAATTRTQNVTVGGYYPGVILGFGSFLGIIGSNLIENKRQMLVASIVFISFGVIAAFCCAIVDGVFAARHIDLKPLYANRCHYVPKTSQKEAEEVISSSTKNSPSTRVMRNLTQAAREVNCPHLSREFCTPRIRGNTCFCCDLYNCGNRVEITGGYYEYIDVSSCQDIIHLYHLLWSATILNIVGLFLGIITAAVLGGFKDMNPTLPALNCSVENTHPTVSYYAHPQVASYNTYYHSPPHLPPYSAYDFQHSGVFPSSPPSGLSDEPQSASPSPSYMWSSSAPPRYSPPYYPPFEKPPPYSP

SEQ ID NO: 28759 - protein, 23 aa, Artificial Sequence
  Synthetic polypeptide
RSWEPRHFQMLMWALLQPPGPRM

SEQ ID NO: 28760 - protein, 23 aa, Artificial Sequence
  Synthetic polypeptide
RSWEPRHFQMLMWALLQPPGPRM

SEQ ID NO: 28761 - protein, 23 aa, Artificial Sequence
  Synthetic polypeptide
RSWEPRHFQMLMWALLQPPGPRM

SEQ ID NO: 28762 - protein, 23 aa, Artificial Sequence
  Synthetic polypeptide
RSWEPRHFQMLMWALLQPPGPRM

SEQ ID NO: 28763 - protein, 292 aa, Artificial Sequence
  Synthetic polypeptide
EVMGTQTLSDADVGLAATTRTQNVTVGGYYPGVILGFGSFLGIIGSNLIENKRQMLVASIVFISFGVIAAFCCAIVDGVFAARHIDLKPLYANRCHYVPKTSQKEAEEVNCPHLSREFCTPRIRGNTCFCCDLYNCGNRVEITGGYYEYIDVSSCQDIIHLYHLLWSATILNIVGLFLGIITAAVLGGFKDMNPTLPALNCSVENTHPTVSYYAHPQVASYNTYYHSPPHLPPYSAYDFQHSGVFPSSPPSGLSDEPQSASPSPSYMWSSSAPPRYSPPYYPPFEKPPPYSP

SEQ ID NO: 28764 - protein, 208 aa, Artificial Sequence
  Synthetic polypeptide
EVMGTQTLSDADVGLAATTRTQNVTVGGYYPGVILGFGSFLGIIGSNLIENKRQMLVASIVFISFGVIAAFCCAIVDGVFAARHIDLKPLYANRCHYVPKTSQKEAEENPTLPALNCSVENTHPTVSYYAHPQVASYNTYYHSPPHLPPYSAYDFQHSGVFPSSPPSGLSDEPQSASPSPSYMWSSSAPPRYSPPYYPPFEKPPPYSP

SEQ ID NO: 28765 - protein, 116 aa, Artificial Sequence
  Synthetic polypeptide
EVMGTQTLSDADVGLAATTRTQNVTVGGYYPGVILGFGSFLGIIGSNLIENKRQMLVASIVFISFGVIAAFCCAIVDGVFAARHIDLKPLYANRCHYVPKTSQKEAEENPTLPALN

SEQ ID NO: 28766 - protein, 342 aa, Artificial Sequence
  Synthetic polypeptide
EVMGTQTLSDADGAFNRRKRNSIYVTVTLLIVSVLILTVGLAATTRTQNVTVGGYYPGVILGFGSFLGIIGSNLIENKRQMLVASIVFISFGVIAAFCCAIVDGVFAARHIDLKPLYANRCHYVPKTSQKEAEEVISSSTKNSPSTRVMRNLTQAAREVNCPHLSREFCTPRIRGNTCFCCDLYNCGNRVEITGGYYEYIDVSSCQDIIHLYHLLWSATILNIVGLFLGIITAAVLGGFKDMNPTLPALNCSVENTHPTVSYYAHPQVASYNTYYHSPPHLPPYSAYDFQHSGVFPSSPPSGLSDEPQSASPSPSYMWSSSAPPRYSPPYYPPFEKPPPYSP

SEQ ID NO: 28767 - protein, 26 aa, Artificial Sequence
  Synthetic polypeptide
RSWEPRHFQMLMEHSIGGNETPSMSP

SEQ ID NO: 28768 - protein, 26 aa, Artificial Sequence
  Synthetic polypeptide
RSWEPRHFQMLMEHSIGGNETPSMSP

SEQ ID NO: 28769 - protein, 26 aa, Artificial Sequence
  Synthetic polypeptide
RSWEPRHFQMLMEHSIGGNETPSMSP

SEQ ID NO: 28770 - protein, 26 aa, Artificial Sequence
  Synthetic polypeptide
RSWEPRHFQMLMEHSIGGNETPSMSP

SEQ ID NO: 28771 - protein, 318 aa, Artificial Sequence
  Synthetic polypeptide
EVMGTQTLSDADGAFNRRKRNSIYVTVTLLIVSVLILTVGLAATTRTQNVTVGGYYPGVILGFGSFLGIIGSNLIENKRQMLVASIVFISFGVIAAFCCAIVDGVFAARHIDLKPLYANRCHYVPKTSQKEAEEVNCPHLSREFCTPRIRGNTCFCCDLYNCGNRVEITGGYYEYIDVSSCQDIIHLYHLLWSATILNIVGLFLGIITAAVLGGFKDMNPTLPALNCSVENTHPTVSYYAHPQVASYNTYYHSPPHLPPYSAYDFQHSGVFPSSPPSGLSDEPQSASPSPSYMWSSSAPPRYSPPYYPPFEKPPPYSP

SEQ ID NO: 28772 - protein, 234 aa, Artificial Sequence
  Synthetic polypeptide
EVMGTQTLSDADGAFNRRKRNSIYVTVTLLIVSVLILTVGLAATTRTQNVTVGGYYPGVILGFGSFLGIIGSNLIENKRQMLVASIVFISFGVIAAFCCAIVDGVFAARHIDLKPLYANRCHYVPKTSQKEAEENPTLPALNCSVENTHPTVSYYAHPQVASYNTYYHSPPHLPPYSAYDFQHSGVFPSSPPSGLSDEPQSASPSPSYMWSSSAPPRYSPPYYPPFEKPPPYSP

SEQ ID NO: 28773 - protein, 142 aa, Artificial Sequence
  Synthetic polypeptide
EVMGTQTLSDADGAFNRRKRNSIYVTVTLLIVSVLILTVGLAATTRTQNVTVGGYYPGVILGFGSFLGIIGSNLIENKRQMLVASIVFISFGVIAAFCCAIVDGVFAARHIDLKPLYANRCHYVPKTSQKEAEENPTLPALN

SEQ ID NO: 28774 - protein, 1508 aa, Artificial Sequence
  Synthetic polypeptide
FVIVDGILEQKENISTSPAHKYYLAMDPVSESLYLSDTNTRKVYKLKSLVETKDLSKNFEVVAGTGDQCLPFDQSHCGDGGRASEASLNSPRGITVDRHGFIYFVDGTMIRKIDENAVITTVIGSNGLTSTQPLSCDSGMDITQVRLEWPTDLAVNPMDNSLYVLDNNIVLQISENRRVRIIAGRPIHCQVPGIDHFLVSKVAIHSTLESARAISVSHSGLLFIAETDERKVNRIQQVTTNGEIYIIAGAPTDCDCKIDPNCDCFSGDGGYAKDAKMKAPSSLAVSPDGTLYVADLGNVRIRTISRNQAHLNDMNIYEIASPADQELYQFTVNGTHLHTLNLITRDYVYNFTYNSEGDLGAITSSNGNSVHIRRDAGGMPLWLVVPGGQVYWLTISSNGVLKRVSAQGYNLALMTYPGNTGLLATKSNENGWTTVYEYDPEGHLTNATFPTGEVSSFHSDLEKLTKVELDTSNRENVLMSTNLTATSTIYILKQENTQSTYRVNPDGSLRVTFASGMEIGLSSEPHILAGAVNPTLGKCNISLPGEHNANLIEWRQRKEQNKGNVSAFERRLRAHNRNLLSIDFDHITRTGKIYDDHRKFTLRILYDQTGRPILWSPVSRYNEVNITYSPSGLVTFIQRGTWNEKMEYDQSGKIISRTWADGKIWSYTYLEKSVMLLLHSQRRYIFEYDQPDCLLSVTMPSMVRHSLQTMLSVGYYRNIYTPPDSSTSFIQDYSRDGRLLQTLHLGTGRRVLYKYTKQARLSEVLYDTTQVTLTYEESSGVIKTIHLMHDGFICTIRYRQTGPLIGRQIFRFSEEGLVNARFDYSYNNFRVTSMQAVINETPLPIDLYRYVDVSGRTEQFGKFSVINYDLNQVITTTVMKHTKIFSANGQVIEVQYEILKAIAYWMTIQYDNVGRMVICDIRVGVDANITRYFYEYDADGQLQTVSVNDKTQWRYSYDLNGNINLLSHGKSARLTPLRYDLRDRITRLGEIQYKMDEDGFLRQRGNDIFEYNSNGLLQKAYNKASGWTVQYYYDGLGRRVASKSSLGQHLQFFYADLTNPIRVTHLYNHTSSEITSLYYDLQGHLIAMELSSGEEYYVACDNTGTPLAVFSSRGQVIKEILYTPYGDIYHDTYPDFQVIIGFHGGLYDFLTKLVHLGQRDYDVVAGRWTTPNHHIWKQLNLLPKPFNLYSFENNYPVGKIQDVAKYTTDIRSWLELFGFQLHNVLPGFPKPELENLELTYELLRLQTKTQEWDPGKTILGIQCELQKQLRNFISLDQLPMTPRYNDGRCLEGGKQPRFAAVPSVFGKGIKFAIKDGIVTADIIGVANEDSRRLAAILNNAHYLENLHFTIEGRDTHYFIKLGSLEEDLVLIGNTGGRRILENGVNVTVSQMTSVLNGRTRRFADIQLQHGALCFNIRYGTTVEEEKNHVLEIARQRAVAQAWTKEQRRLQEGEEGIRAWTEGEKQQLLSTGRVQGYDGYFVLSVEQYLELSDSANNIHFMRQSEIGRR

SEQ ID NO: 28775 - protein, 1508 aa, Artificial Sequence; identical to SEQ ID NO: 28774
  Synthetic polypeptide

SEQ ID NO: 28776 - protein, 53 aa, Artificial Sequence
  Synthetic polypeptide
EDMTTKYNLLSWMGSWNRKRTLAQVLLTNTIWLWTLCLNHSIYQTPILAKSTS

SEQ ID NO: 28777 - protein, 53 aa, Artificial Sequence; identical to SEQ ID NO: 28776
  Synthetic polypeptide

SEQ ID NO: 28778 - protein, 64 aa, Artificial Sequence
  Synthetic polypeptide
NMELVSDQRVRQSPRPQKLLFLPAPRQFHRLPSRGRTTAKVSSSTSGTKWSWGLCYGTSLTECQ

SEQ ID NO: 28779 - protein, 64 aa, Artificial Sequence; identical to SEQ ID NO: 28778
  Synthetic polypeptide

SEQ ID NO: 28780 - protein, 64 aa, Artificial Sequence; identical to SEQ ID NO: 28778
  Synthetic polypeptide

SEQ ID NO: 28781 - protein, 64 aa, Artificial Sequence; identical to SEQ ID NO: 28778
  Synthetic polypeptide

SEQ ID NO: 28782 - protein, 64 aa, Artificial Sequence; identical to SEQ ID NO: 28778
  Synthetic polypeptide

SEQ ID NO: 28783 - protein, 12 aa, Artificial Sequence
  Synthetic polypeptide
AHETWNWYPIRE

SEQ ID NO: 28784 - protein, 12 aa, Artificial Sequence
  Synthetic polypeptide
AHETWNWYPIRE

SEQ ID NO: 28785 - protein, 12 aa, Artificial Sequence
  Synthetic polypeptide
AHETWNWYPIRE

SEQ ID NO: 28786 - protein, 12 aa, Artificial Sequence
  Synthetic polypeptide
AHETWNWYPIRE

SEQ ID NO: 28787 - protein, 12 aa, Artificial Sequence
  Synthetic polypeptide
AHETWNWYPIRE

SEQ ID NO: 28788 - protein, 123 aa, Artificial Sequence
  Synthetic polypeptide
HCPIELSAAMEMFHLCSVQYVSHQPHVAFELMKHGTGIRSESETESEASEITIPPSTPAVPQAPVQGEDYGKGVIFYLRDKVVVGIVLWNIFNRMPIARKIIKDGEQHEDLNEVAKLFNIHED

SEQ ID NO: 28789 - protein, 123 aa, Artificial Sequence; identical to SEQ ID NO: 28788
  Synthetic polypeptide

SEQ ID NO: 28790 - protein, 123 aa, Artificial Sequence; identical to SEQ ID NO: 28788
  Synthetic polypeptide

SEQ ID NO: 28791 - protein, 123 aa, Artificial Sequence; identical to SEQ ID NO: 28788
  Synthetic polypeptide

SEQ ID NO: 28792 - protein, 123 aa, Artificial Sequence; identical to SEQ ID NO: 28788
  Synthetic polypeptide

SEQ ID NO: 28793 - protein, 45 aa, Artificial Sequence
  Synthetic polypeptide
AGIQEFWTFILALPLISCVLGECLGRSPRTQPRPQDEDGIDTQPL

SEQ ID NO: 28794 - protein, 45 aa, Artificial Sequence; identical to SEQ ID NO: 28793
  Synthetic polypeptide

SEQ ID NO: 28795 - protein, 45 aa, Artificial Sequence; identical to SEQ ID NO: 28793
  Synthetic polypeptide

SEQ ID NO: 28796 - protein, 521 aa, Artificial Sequence
  Synthetic polypeptide
LAVSLVSVLGGAPGHNPDRRTKMVSIHSLSELERLKLQETAYHELVARHFLSEFKPDRALPIDRPNTLDKWFLILRGQQRAVSHKTFGISLEEVLVNEFTRRKHLELTATMQVEEATGQAAGRRRGNVVRRVFGRIRRFFSRRRNEPTLPREFTRRGRRGAVSVDSLAELEDGALLLQTLQLSKISFPIGQRLLGSKRKMSLNPIAKQIPQVVEACCQFIEKHGLSAVGIFTLEYSVQRVRQLREEFDQGLDVVLDDNQNVHDVAALLKEFFRDMKDSLLPDDLYMSFLLTATLKPQDQLSALQLLVYLMPPCHSDTLERLLKALHKITENCEDSIGIDGQLVPGNRMTSTNLALVFGSALLKKGKFGKRESRKTKLGIDHYVASVNVVRAMIDNWDVLFQVPPHIQRQVAKRVWKSSPEALDFIRRRNLRKIQSARIKMEEDALLSDPVETSAEARAAVLAQSKPSDEGSSEEPAVPSGTARSHDDEEGAGNPPIPEQDRPLLRVPREKEAKTGVSYFFP

SEQ ID NO: 28797 - protein, 521 aa, Artificial Sequence; identical to SEQ ID NO: 28796
  Synthetic polypeptide

SEQ ID NO: 28798 - protein, 521 aa, Artificial Sequence; identical to SEQ ID NO: 28796
  Synthetic polypeptide

SEQ ID NO: 28799 - protein, 29 aa, Artificial Sequence
  Synthetic polypeptide
ATQFEDQICKYVSLRAQHAAQERWKKNTN

SEQ ID NO: 28800 - protein, 29 aa, Artificial Sequence
  Synthetic polypeptide
ATQFEDQICKYVSLRAQHAAQERWKKNTN

SEQ ID NO: 28801 - protein, 30 aa, Artificial Sequence
  Synthetic polypeptide
STSGHQSCERINFSCFKPPNLRIRFASMSP

SEQ ID NO: 28802 - protein, 30 aa, Artificial Sequence; identical to SEQ ID NO: 28801
  Synthetic polypeptide

SEQ ID NO: 28803 - protein, 40 aa, Artificial Sequence
  Synthetic polypeptide
GAHFPQLPEGRFLESATSGEAPQLHCHFVRCRCLSSSKGM

SEQ ID NO: 28804 - protein, 40 aa, Artificial Sequence; identical to SEQ ID NO: 28803
  Synthetic polypeptide

SEQ ID NO: 28805 - protein, 40 aa, Artificial Sequence; identical to SEQ ID NO: 28803
  Synthetic polypeptide

SEQ ID NO: 28806 - protein, 89 aa, Artificial Sequence
  Synthetic polypeptide
DASPCTSLPGALGGTFPTTPRGQVSRKCHQWGGATTSLPFCEVPLSLLQQGNVTVLRIRKGRGWPCWQGNKEQETALLQALPCPKQRSL

SEQ ID NO: 28807 - protein, 89 aa, Artificial Sequence; identical to SEQ ID NO: 28806
  Synthetic polypeptide

SEQ ID NO: 28808 - protein, 89 aa, Artificial Sequence; identical to SEQ ID NO: 28806
  Synthetic polypeptide

SEQ ID NO: 28809 - protein, 178 aa, Artificial Sequence
  Synthetic polypeptide
GAAVSPPARECDSPSYQKRQRMALLARKQGAGDSLIAGSAMSKAKKLMTGHAIPPSQLDSQIDDFTGFSKDRMMQKPGSNAPVGGNVTSSFSGDDLECRETASSPKSQREINADIKRKLVKELRCVGQKYEKIFEMLEGVQGPTAVRKRFFESIIKEAARCMRRDFVKHLKKKLKRMI

SEQ ID NO: 28810 - protein, 178 aa, Artificial Sequence; identical to SEQ ID NO: 28809
  Synthetic polypeptide

SEQ ID NO: 28811 - protein, 178 aa, Artificial Sequence; identical to SEQ ID NO: 28809
  Synthetic polypeptide

SEQ ID NO: 28812 - protein, 178 aa, Artificial Sequence
  Synthetic polypeptide
GAAVSPPARECDSPSYQKRQRMALLARKQGAGDSLIAGSAMSKEKKLMTGHAIPPSQLDSQIDDFTGFSKDRMMQKPGSNAPVGGNVTSSFSGDDLECRETASSPKSQQEINADIKRKLVKELRCVGQKYEKIFEMLEGVQGPTAVRKRFFESIIKEAARCMRRDFVKHLKKKLKRMI

SEQ ID NO: 28813 - protein, 178 aa, Artificial Sequence; identical to SEQ ID NO: 28812
  Synthetic polypeptide

SEQ ID NO: 28814 - protein, 178 aa, Artificial Sequence; identical to SEQ ID NO: 28812
  Synthetic polypeptide

SEQ ID NO: 28815 - protein, 89 aa, Artificial Sequence
  Synthetic polypeptide
DASPCTSLPGALGGTFPTTPRGQVSRKCHQWGGATTSLPFCEVPLSLLQQGNVTVLRIRKGRGWPCWQGNKEQETALLQALPCPKKRSL

SEQ ID NO: 28816 - protein, 89 aa, Artificial Sequence; identical to SEQ ID NO: 28815
  Synthetic polypeptide

SEQ ID NO: 28817 - protein, 89 aa, Artificial Sequence; identical to SEQ ID NO: 28815
  Synthetic polypeptide

SEQ ID NO: 28818 - protein, 40 aa, Artificial Sequence; identical to SEQ ID NO: 28803
  Synthetic polypeptide

SEQ ID NO: 28819 - protein, 40 aa, Artificial Sequence; identical to SEQ ID NO: 28803
  Synthetic polypeptide

SEQ ID NO: 28820 - protein, 40 aa, Artificial Sequence; identical to SEQ ID NO: 28803
  Synthetic polypeptide

SEQ ID NO: 28821 - protein, 178 aa, Artificial Sequence
  Synthetic polypeptide
GAAVSPPARECDSPSYQKRQRMALLARKQGAGDSLIAGSAMSKEKKLMTGHAIPPSQLDSQIDDFTGFSKDRMMQKPGSNAPVGGNVTSSFSGDDLECRETASSPKSQREINADIKRKLVKELRCVGQKYEKIFEMLEGVQGPTAVRKRFFESIIKEAARCMRRDFVKHLKKKLKRMI

SEQ ID NO: 28822 - protein, 178 aa, Artificial Sequence; identical to SEQ ID NO: 28821
  Synthetic polypeptide

SEQ ID NO: 28823 - protein, 178 aa, Artificial Sequence; identical to SEQ ID NO: 28821
  Synthetic polypeptide

SEQ ID NO: 28824 - protein, 89 aa, Artificial Sequence; identical to SEQ ID NO: 28815
  Synthetic polypeptide

SEQ ID NO: 28825 - protein, 89 aa, Artificial Sequence; identical to SEQ ID NO: 28815
  Synthetic polypeptide

SEQ ID NO: 28826 - protein, 89 aa, Artificial Sequence; identical to SEQ ID NO: 28815
  Synthetic polypeptide

SEQ ID NO: 28827 - protein, 40 aa, Artificial Sequence; identical to SEQ ID NO: 28803
  Synthetic polypeptide

SEQ ID NO: 28828 - protein, 40 aa, Artificial Sequence; identical to SEQ ID NO: 28803
  Synthetic polypeptide

SEQ ID NO: 28829 - protein, 40 aa, Artificial Sequence; identical to SEQ ID NO: 28803
  Synthetic polypeptide

SEQ ID NO: 28830 - protein, 89 aa, Artificial Sequence
  Synthetic polypeptide
DASPCTSLPGALGGTFPTTPRGQVSRKCHQWGGATTSLPFCEVPPSLLQQGNVTVLRIRKGRGWPCWQGNKEQETALLQALPCPKKRSL

SEQ ID NO: 28831 - protein, 89 aa, Artificial Sequence; identical to SEQ ID NO: 28830
  Synthetic polypeptide

SEQ ID NO: 28832 - protein, 89 aa, Artificial Sequence; identical to SEQ ID NO: 28830
  Synthetic polypeptide

SEQ ID NO: 28833 - protein, 40 aa, Artificial Sequence
  Synthetic polypeptide
GAHFPQLPEGRFLESATSGEAPQLHCHFVRCRRLSSSKGM

SEQ ID NO: 28834 - protein, 40 aa, Artificial Sequence; identical to SEQ ID NO: 28833
  Synthetic polypeptide

SEQ ID NO: 28835 - protein, 40 aa, Artificial Sequence; identical to SEQ ID NO: 28833
  Synthetic polypeptide

SEQ ID NO: 28836 - protein, 178 aa, Artificial Sequence; identical to SEQ ID NO: 28812
  Synthetic polypeptide

SEQ ID NO: 28837 - protein, 178 aa, Artificial Sequence; identical to SEQ ID NO: 28812
  Synthetic polypeptide

SEQ ID NO: 28838 - protein, 178 aa, Artificial Sequence; identical to SEQ ID NO: 28812
  Synthetic polypeptide

SEQ ID NO: 28839 - protein, 89 aa, Artificial Sequence; identical to SEQ ID NO: 28830
  Synthetic polypeptide

SEQ ID NO: 28840 - protein, 89 aa, Artificial Sequence; identical to SEQ ID NO: 28830
  Synthetic polypeptide

SEQ ID NO: 28841 - protein, 89 aa, Artificial Sequence; identical to SEQ ID NO: 28830
  Synthetic polypeptide

SEQ ID NO: 28842 - protein, 40 aa, Artificial Sequence; identical to SEQ ID NO: 28833
  Synthetic polypeptide

SEQ ID NO: 28843 - protein, 40 aa, Artificial Sequence; identical to SEQ ID NO: 28833
  Synthetic polypeptide

SEQ ID NO: 28844 - protein, 40 aa, Artificial Sequence; identical to SEQ ID NO: 28833
  Synthetic polypeptide

SEQ ID NO: 28845 - protein, 178 aa, Artificial Sequence; identical to SEQ ID NO: 28821
  Synthetic polypeptide

SEQ ID NO: 28846 - protein, 178 aa, Artificial Sequence; identical to SEQ ID NO: 28821
  Synthetic polypeptide

SEQ ID NO: 28847 - protein, 178 aa, Artificial Sequence; identical to SEQ ID NO: 28821
  Synthetic polypeptide

SEQ ID NO: 28848 - protein, 58 aa, Artificial Sequence
  Synthetic polypeptide
DASPCTSLPGALGGTFPTTPRGQVSRKCHQWGGATTSLPFCEVPPSLLQQGQDFRTGM

SEQ ID NO: 28849 - protein, 58 aa, Artificial Sequence; identical to SEQ ID NO: 28848
  Synthetic polypeptide

SEQ ID NO: 28850 - protein, 58 aa, Artificial Sequence; identical to SEQ ID NO: 28848
  Synthetic polypeptide

SEQ ID NO: 28851 - protein, 53 aa, Artificial Sequence
  Synthetic polypeptide
GAAVSPPARSGLQDWNVTVLRIRKGRGWPCWQGNKEQETALLQALPCPKKRSL

SEQ ID NO: 28852 - protein, 53 aa, Artificial Sequence; identical to SEQ ID NO: 28851
  Synthetic polypeptide

SEQ ID NO: 28853 - protein, 53 aa, Artificial Sequence; identical to SEQ ID NO: 28851
  Synthetic polypeptide

SEQ ID NO: 28854 - protein, 213 aa, Artificial Sequence
  Synthetic polypeptide
GAHFPQLPEGRFLESATSGEAPQLHCHFVRCRRLSSSKVRTSGLECDSPSYQKRQRMALLARKQGAGDSLIAGSAMSKEKKLMTGHAIPPSQLDSQIDDFTGFSKDRMMQKPGSNAPVGGNVTSSFSGDDLECRETASSPKSQQEINADIKRKLVKELRCVGQKYEKIFEMLEGVQGPTAVRKRFFESIIKEAARCMRRDFVKHLKKKLKRMI

SEQ ID NO: 28855 - protein, 213 aa, Artificial Sequence; identical to SEQ ID NO: 28854
  Synthetic polypeptide

SEQ ID NO: 28856 - protein, 213 aa, Artificial Sequence; identical to SEQ ID NO: 28854
  Synthetic polypeptide

SEQ ID NO: 28857 - protein, 58 aa, Artificial Sequence; identical to SEQ ID NO: 28848
  Synthetic polypeptide

SEQ ID NO: 28858 - protein, 58 aa, Artificial Sequence; identical to SEQ ID NO: 28848
  Synthetic polypeptide

SEQ ID NO: 28859 - protein, 58 aa, Artificial Sequence; identical to SEQ ID NO: 28848
  Synthetic polypeptide

SEQ ID NO: 28860 - protein, 213 aa, Artificial Sequence
  Synthetic polypeptide
GAHFPQLPEGRFLESATSGEAPQLHCHFVRCRRLSSSKVRTSGLECDSPSYQKRQRMALLARKQGAGDSLIAGSAMSKEKKLMTGHAIPPSQLDSQIDDFTGFSKDRMMQKPGSNAPVGGNVTSSFSGDDLECRETASSPKSQREINADIKRKLVKELRCVGQKYEKIFEMLEGVQGPTAVRKRFFESIIKEAARCMRRDFVKHLKKKLKRMI

SEQ ID NO: 28861 - protein, 213 aa, Artificial Sequence; identical to SEQ ID NO: 28860
  Synthetic polypeptide

SEQ ID NO: 28862 - protein, 213 aa, Artificial Sequence; identical to SEQ ID NO: 28860
  Synthetic polypeptide

SEQ ID NO: 28863 - protein, 53 aa, Artificial Sequence; identical to SEQ ID NO: 28851
  Synthetic polypeptide

SEQ ID NO: 28864 - protein, 53 aa, Artificial Sequence; identical to SEQ ID NO: 28851
  Synthetic polypeptide

SEQ ID NO: 28865 - protein, 53 aa, Artificial Sequence; identical to SEQ ID NO: 28851
  Synthetic polypeptide

SEQ ID NO: 28866 - protein, 89 aa, Artificial Sequence; identical to SEQ ID NO: 28830
  Synthetic polypeptide

SEQ ID NO: 28867 - protein, 89 aa, Artificial Sequence; identical to SEQ ID NO: 28830
  Synthetic polypeptide

SEQ ID NO: 28868 - protein, 89 aa, Artificial Sequence; identical to SEQ ID NO: 28830
  Synthetic polypeptide

SEQ ID NO: 28869 - protein, 40 aa, Artificial Sequence; identical to SEQ ID NO: 28833
  Synthetic polypeptide

SEQ ID NO: 28870 - protein, 40 aa, Artificial Sequence; identical to SEQ ID NO: 28833
  Synthetic polypeptide

SEQ ID NO: 28871 - protein, 40 aa, Artificial Sequence; identical to SEQ ID NO: 28833
  Synthetic polypeptide

SEQ ID NO: 28872 - protein, 178 aa, Artificial Sequence; identical to SEQ ID NO: 28821
  Synthetic polypeptide

SEQ ID NO: 28873 - protein, 178 aa, Artificial Sequence; identical to SEQ ID NO: 28821
  Synthetic polypeptide

SEQ ID NO: 28874 - protein, 178 aa, Artificial Sequence; identical to SEQ ID NO: 28821
  Synthetic polypeptide

SEQ ID NO: 28875 - protein, 58 aa, Artificial Sequence; identical to SEQ ID NO: 28848
  Synthetic polypeptide

SEQ ID NO: 28876 - protein, 58 aa, Artificial Sequence; identical to SEQ ID NO: 28848
  Synthetic polypeptide

SEQ ID NO: 28877 - protein, 58 aa, Artificial Sequence; identical to SEQ ID NO: 28848
  Synthetic polypeptide

SEQ ID NO: 28878 - protein, 213 aa, Artificial Sequence; identical to SEQ ID NO: 28860
  Synthetic polypeptide

SEQ ID NO: 28879 - protein, 213 aa, Artificial Sequence; identical to SEQ ID NO: 28860
  Synthetic polypeptide

SEQ ID NO: 28880 - protein, 213 aa, Artificial Sequence; identical to SEQ ID NO: 28860
  Synthetic polypeptide

SEQ ID NO: 28881 - protein, 53 aa, Artificial Sequence; identical to SEQ ID NO: 28851
  Synthetic polypeptide

SEQ ID NO: 28882 - protein, 53 aa, Artificial Sequence; identical to SEQ ID NO: 28851
  Synthetic polypeptide

SEQ ID NO: 28883 - protein, 53 aa, Artificial Sequence; identical to SEQ ID NO: 28851
  Synthetic polypeptide

SEQ ID NO: 28884 - protein, 58 aa, Artificial Sequence; identical to SEQ ID NO: 28848
  Synthetic polypeptide

SEQ ID NO: 28885 - protein, 58 aa, Artificial Sequence; identical to SEQ ID NO: 28848
  Synthetic polypeptide

SEQ ID NO: 28886 - protein, 58 aa, Artificial Sequence; identical to SEQ ID NO: 28848
  Synthetic polypeptide

SEQ ID NO: 28887 - protein, 213 aa, Artificial Sequence
  Synthetic polypeptide
GAHFPQLPEGRFLESATSGEAPQLHCHFVRCRRLSSSKVRTSGLECDSPSYQKRQRMALLARKQGAGDSLIAGSAMSKAKKLMTGHAIPPSQLDSQIDDFTGFSKDRMMQKPGSNAPVGGNVTSSFSGDDLECRETASSPKSQQEINADIKRKLVKELRCVGQKYEKIFEMLEGVQGPTAVRKRFFESIIKEAARCMRRDFVKHLKKKLKRMI

SEQ ID NO: 28888 - protein, 213 aa, Artificial Sequence; identical to SEQ ID NO: 28887
  Synthetic polypeptide

SEQ ID NO: 28889 - protein, 213 aa, Artificial Sequence; identical to SEQ ID NO: 28887
  Synthetic polypeptide

SEQ ID NO: 28890 - protein, 53 aa, Artificial Sequence
  Synthetic polypeptide
GAAVSPPARSGLQDWNVTVLRIRKGRGWPCWQGNKEQETALLQALPCPKQRSL

SEQ ID NO: 28891 - protein, 53 aa, Artificial Sequence; identical to SEQ ID NO: 28890
  Synthetic polypeptide

SEQ ID NO: 28892 - protein, 53 aa, Artificial Sequence; identical to SEQ ID NO: 28890
  Synthetic polypeptide

SEQ ID NO: 28893 - protein, 73 aa, Artificial Sequence
  Synthetic polypeptide
GAHFPQLPEGRFLESATSGEAPQLHCHFVRCRRLSSSKETRSRRQPYCRLCHVQSKEAYDRTCYSTQPIGFSD

SEQ ID NO: 28894 - protein, 73 aa, Artificial Sequence; identical to SEQ ID NO: 28893
  Synthetic polypeptide

SEQ ID NO: 28895 - protein, 73 aa, Artificial Sequence; identical to SEQ ID NO: 28893
  Synthetic polypeptide

SEQ ID NO: 28896 - protein, 160 aa, Artificial Sequence
  Synthetic polypeptide
GAAVSPPARKQGAGDSLIAGSAMSKAKKLMTGHAIPPSQLDSQIDDFTGFSKDRMMQKPGSNAPVGGNVTSSFSGDDLECRETASSPKSQQEINADIKRKLVKELRCVGQKYEKIFEMLEGVQGPTAVRKRFFESIIKEAARCMRRDFVKHLKKKLKRMI

SEQ ID NO: 28897 - protein, 160 aa, Artificial Sequence; identical to SEQ ID NO: 28896
  Synthetic polypeptide

SEQ ID NO: 28898 - protein, 160 aa, Artificial Sequence; identical to SEQ ID NO: 28896
  Synthetic polypeptide

SEQ ID NO: 28899 - protein, 71 aa, Artificial Sequence
  Synthetic polypeptide
DASPCTSLPGALGGTFPTTPRGQVSRKCHQWGGATTSLPFCEVPPSLLQQGNKEQETALLQALPCPKQRSL

SEQ ID NO: 28900 - protein, 71 aa, Artificial Sequence; identical to SEQ ID NO: 28899
  Synthetic polypeptide

SEQ ID NO: 28901 - protein, 71 aa, Artificial Sequence; identical to SEQ ID NO: 28899
  Synthetic polypeptide

SEQ ID NO: 28902 - protein, 40 aa, Artificial Sequence; identical to SEQ ID NO: 28833
  Synthetic polypeptide

SEQ ID NO: 28903 - protein, 40 aa, Artificial Sequence; identical to SEQ ID NO: 28833
  Synthetic polypeptide

SEQ ID NO: 28904 - protein, 40 aa, Artificial Sequence; identical to SEQ ID NO: 28833
  Synthetic polypeptide

SEQ ID NO: 28905 - protein, 89 aa, Artificial Sequence
  Synthetic polypeptide
DASPCTSLPGALGGTFPTTPRGQVSRKCHQWGGATTSLPFCEVPPSLLQQGNVTVLRIRKGRGWPCWQGNKEQETALLQALPCPKQRSL

SEQ ID NO: 28906 - protein, 89 aa, Artificial Sequence; identical to SEQ ID NO: 28905
  Synthetic polypeptide

SEQ ID NO: 28907 - protein, 89 aa, Artificial Sequence; identical to SEQ ID NO: 28905
  Synthetic polypeptide

SEQ ID NO: 28908 - protein, 178 aa, Artificial Sequence
  Synthetic polypeptide
GAAVSPPARECDSPSYQKRQRMALLARKQGAGDSLIAGSAMSKAKKLMTGHAIPPSQLDSQIDDFTGFSKDRMMQKPGSNAPVGGNVTSSFSGDDLECRETASSPKSQQEINADIKRKLVKELRCVGQKYEKIFEMLEGVQGPTAVRKRFFESIIKEAARCMRRDFVKHLKKKLKRMI

SEQ ID NO: 28909 - protein, 178 aa, Artificial Sequence; identical to SEQ ID NO: 28908
  Synthetic polypeptide

SEQ ID NO: 28910 - protein, 178 aa, Artificial Sequence; identical to SEQ ID NO: 28908
  Synthetic polypeptide

SEQ ID NO: 28911 - protein, 58 aa, Artificial Sequence; identical to SEQ ID NO: 28848
  Synthetic polypeptide

SEQ ID NO: 28912 - protein, 58 aa, Artificial Sequence; identical to SEQ ID NO: 28848
  Synthetic polypeptide

SEQ ID NO: 28913 - protein, 58 aa, Artificial Sequence; identical to SEQ ID NO: 28848
  Synthetic polypeptide

SEQ ID NO: 28914 - protein, 213 aa, Artificial Sequence; identical to SEQ ID NO: 28887
  Synthetic polypeptide

SEQ ID NO: 28915 - protein, 213 aa, Artificial Sequence; identical to SEQ ID NO: 28887
  Synthetic polypeptide

SEQ ID NO: 28916 - protein, 213 aa, Artificial Sequence; identical to SEQ ID NO: 28887
  Synthetic polypeptide

SEQ ID NO: 28917 - protein, 53 aa, Artificial Sequence; identical to SEQ ID NO: 28890
  Synthetic polypeptide

SEQ ID NO: 28918 - protein, 53 aa, Artificial Sequence; identical to SEQ ID NO: 28890
  Synthetic polypeptide

SEQ ID NO: 28919 - protein, 53 aa, Artificial Sequence; identical to SEQ ID NO: 28890
  Synthetic polypeptide

SEQ ID NO: 28920 - protein, 58 aa, Artificial Sequence; identical to SEQ ID NO: 28848
  Synthetic polypeptide

SEQ ID NO: 28921 - protein, 58 aa, Artificial Sequence; identical to SEQ ID NO: 28848
  Synthetic polypeptide

SEQ ID NO: 28922 - protein, 58 aa, Artificial Sequence; identical to SEQ ID NO: 28848
  Synthetic polypeptide

SEQ ID NO: 28923 - protein, 58 aa, Artificial Sequence; identical to SEQ ID NO: 28848
  Synthetic polypeptide

SEQ ID NO: 28924 - protein, 53 aa, Artificial Sequence; identical to SEQ ID NO: 28851
  Synthetic polypeptide

SEQ ID NO: 28925 - protein, 53 aa, Artificial Sequence; identical to SEQ ID NO: 28851
  Synthetic polypeptide

SEQ ID NO: 28926 - protein, 53 aa, Artificial Sequence; identical to SEQ ID NO: 28851
  Synthetic polypeptide

SEQ ID NO: 28927 - protein, 53 aa, Artificial Sequence; identical to SEQ ID NO: 28851
  Synthetic polypeptide

SEQ ID NO: 28928 - protein, 213 aa, Artificial Sequence; identical to SEQ ID NO: 28854
  Synthetic polypeptide

SEQ ID NO: 28929 - protein, 213 aa, Artificial Sequence
  Synthetic polypeptide
GAHFPQLPEGRFLESATSGEAPQLHCHFVRCRRLSSSKVRTSGLECDSPSYQKRQRMALLARKQGAGDSLIAGSAMSKEKKLMTGHAIPPSQLDSQIDDFTGFSKDGMMQKPGSNAPVGGNVTSNFSGDDLECRGIASSPKSQQEINADIKCQVVKEIRCLGRKYEKIFEMLEGVQGPTAVRKRFFESIIKEAARCMRRDFVKHLKKKLKRMI

SEQ ID NO: 28930 - protein, 213 aa, Artificial Sequence; identical to SEQ ID NO: 28929
  Synthetic polypeptide

SEQ ID NO: 28931 - protein, 213 aa, Artificial Sequence; identical to SEQ ID NO: 28929
  Synthetic polypeptide

SEQ ID NO: 28932 - protein, 73 aa, Artificial Sequence; identical to SEQ ID NO: 28893
  Synthetic polypeptide

SEQ ID NO: 28933 - protein, 73 aa, Artificial Sequence; identical to SEQ ID NO: 28893
  Synthetic polypeptide

SEQ ID NO: 28934 - protein, 73 aa, Artificial Sequence; identical to SEQ ID NO: 28893
  Synthetic polypeptide

SEQ ID NO: 28935 - protein, 160 aa, Artificial Sequence; identical to SEQ ID NO: 28896
  Synthetic polypeptide

SEQ ID NO: 28936 - protein, 160 aa, Artificial Sequence; identical to SEQ ID NO: 28896
  Synthetic polypeptide

SEQ ID NO: 28937 - protein, 160 aa, Artificial Sequence; identical to SEQ ID NO: 28896
  Synthetic polypeptide

SEQ ID NO: 28938 - protein, 71 aa, Artificial Sequence; identical to SEQ ID NO: 28899
  Synthetic polypeptide

SEQ ID NO: 28939 - protein, 71 aa, Artificial Sequence; identical to SEQ ID NO: 28899
  Synthetic polypeptide

SEQ ID NO: 28940 - protein, 71 aa, Artificial Sequence; identical to SEQ ID NO: 28899
  Synthetic polypeptide

SEQ ID NO: 28941 - protein, 40 aa, Artificial Sequence; identical to SEQ ID NO: 28833
  Synthetic polypeptide

SEQ ID NO: 28942 - protein, 40 aa, Artificial Sequence; identical to SEQ ID NO: 28833
  Synthetic polypeptide

SEQ ID NO: 28943 - protein, 40 aa, Artificial Sequence; identical to SEQ ID NO: 28833
  Synthetic polypeptide

SEQ ID NO: 28944 - protein, 89 aa, Artificial Sequence; identical to SEQ ID NO: 28905
  Synthetic polypeptide

SEQ ID NO: 28945 - protein, 89 aa, Artificial Sequence; identical to SEQ ID NO: 28905
  Synthetic polypeptide

SEQ ID NO: 28946 - protein, 89 aa, Artificial Sequence; identical to SEQ ID NO: 28905
  Synthetic polypeptide

SEQ ID NO: 28947 - protein, 178 aa, Artificial Sequence; identical to SEQ ID NO: 28908
  Synthetic polypeptide

SEQ ID NO: 28948 - protein, 178 aa, Artificial Sequence; identical to SEQ ID NO: 28908
  Synthetic polypeptide

SEQ ID NO: 28949 - protein, 178 aa, Artificial Sequence; identical to SEQ ID NO: 28908
  Synthetic polypeptide

SEQ ID NO: 28950 - protein, 73 aa, Artificial Sequence
  Synthetic polypeptide
GAHFPQLPEGRFLESATSGEAPQLHCHFVRCRRLSSSKETRSRRQPYCRLCHVQRKEAYDRTCYSTQPIGFSD

SEQ ID NO: 28951 - protein, 73 aa, Artificial Sequence; identical to SEQ ID NO: 28950
  Synthetic polypeptide

SEQ ID NO: 28952 - protein, 73 aa, Artificial Sequence; identical to SEQ ID NO: 28950
  Synthetic polypeptide

SEQ ID NO: 28953 - protein, 73 aa, Artificial Sequence; identical to SEQ ID NO: 28950
  Synthetic polypeptide

SEQ ID NO: 28954 - protein, 160 aa, Artificial Sequence
  Synthetic polypeptide
GAAVSPPARKQGAGDSLIAGSAMSKEKKLMTGHAIPPSQLDSQIDDFTGFSKDRMMQKPGSNAPVGGNVTSSFSGDDLECRETASSPKSQQEINADIKRKLVKELRCVGQKYEKIFEMLEGVQGPTAVRKRFFESIIKEAARCMRRDFVKHLKKKLKRMI

SEQ ID NO: 28955 - protein, 160 aa, Artificial Sequence
  Synthetic polypeptide
GAAVSPPARKQGAGDSLIAGSAMSKEKKLMTGHAIPPSQLDSQIDDFTGFSKDGMMQKPGSNAPVGGNVTSNFSGDDLECRGIASSPKSQQEINADIKCQVVKEIRCLGRKYEKIFEMLEGVQGPTAVRKRFFESIIKEAARCMRRDFVKHLKKKLKRMI

SEQ ID NO: 28956 - protein, 160 aa, Artificial Sequence; identical to SEQ ID NO: 28955
  Synthetic polypeptide

SEQ ID NO: 28957 - protein, 160 aa, Artificial Sequence; identical to SEQ ID NO: 28955
  Synthetic polypeptide

SEQ ID NO: 28958 - protein, 71 aa, Artificial Sequence
  Synthetic polypeptide
DASPCTSLPGALGGTFPTTPRGQVSRKCHQWGGATTSLPFCEVPPSLLQQGNKEQETALLQALPCPKKRSL

SEQ ID NO: 28959 - protein, 71 aa, Artificial Sequence; identical to SEQ ID NO: 28958
  Synthetic polypeptide

SEQ ID NO: 28960 - protein, 71 aa, Artificial Sequence; identical to SEQ ID NO: 28958
  Synthetic polypeptide

SEQ ID NO: 28961 - protein, 71 aa, Artificial Sequence; identical to SEQ ID NO: 28958
  Synthetic polypeptide

SEQ ID NO: 28962 - protein, 89 aa, Artificial Sequence; identical to SEQ ID NO: 28830
  Synthetic polypeptide

SEQ ID NO: 28963 - protein, 89 aa, Artificial Sequence; identical to SEQ ID NO: 28830
  Synthetic polypeptide

SEQ ID NO: 28964 - protein, 89 aa, Artificial Sequence; identical to SEQ ID NO: 28830
  Synthetic polypeptide

SEQ ID NO: 28965 - protein, 89 aa, Artificial Sequence; identical to SEQ ID NO: 28830
  Synthetic polypeptide

SEQ ID NO: 28966 - protein, 40 aa, Artificial Sequence; identical to SEQ ID NO: 28833
  Synthetic polypeptide

SEQ ID NO: 28967 - protein, 40 aa, Artificial Sequence; identical to SEQ ID NO: 28833
  Synthetic polypeptide

SEQ ID NO: 28968 - protein, 40 aa, Artificial Sequence; identical to SEQ ID NO: 28833
  Synthetic polypeptide

SEQ ID NO: 28969 - protein, 40 aa, Artificial Sequence; identical to SEQ ID NO: 28833
  Synthetic polypeptide

SEQ ID NO: 28970 - protein, 178 aa, Artificial Sequence; identical to SEQ ID NO: 28812
  Synthetic polypeptide

SEQ ID NO: 28971 - protein, 178 aa, Artificial Sequence
  Synthetic polypeptide
GAAVSPPARECDSPSYQKRQRMALLARKQGAGDSLIAGSAMSKEKKLMTGHAIPPSQLDSQIDDFTGFSKDGMMQKPGSNAPVGGNVTSNFSGDDLECRGIASSPKSQQEINADIKCQVVKEIRCLGRKYEKIFEMLEGVQGPTAVRKRFFESIIKEAARCMRRDFVKHLKKKLKRMI

SEQ ID NO: 28972 - protein, 178 aa, Artificial Sequence; identical to SEQ ID NO: 28971
  Synthetic polypeptide

SEQ ID NO: 28973 - protein, 178 aa, Artificial Sequence; identical to SEQ ID NO: 28971
  Synthetic polypeptide

SEQ ID NO: 28974 - protein, 213 aa, Artificial Sequence; identical to SEQ ID NO: 28887
  Synthetic polypeptide

SEQ ID NO: 28975 - protein, 213 aa, Artificial Sequence; identical to SEQ ID NO: 28887
  Synthetic polypeptide

SEQ ID NO: 28976 - protein, 213 aa, Artificial Sequence; identical to SEQ ID NO: 28887
  Synthetic polypeptide

SEQ ID NO: 28977 - protein, 53 aa, Artificial Sequence; identical to SEQ ID NO: 28890
  Synthetic polypeptide

SEQ ID NO: 28978 - protein, 53 aa, Artificial Sequence; identical to SEQ ID NO: 28890
  Synthetic polypeptide

SEQ ID NO: 28979 - protein, 53 aa, Artificial Sequence; identical to SEQ ID NO: 28890
  Synthetic polypeptide

SEQ ID NO: 28980 - protein, 58 aa, Artificial Sequence
  Synthetic polypeptide
DVSPCTSLPDALGGTFPTTPRGQVSRKCHQWGGATTSLPFCEVPPSLLQQGQDFRTGM

SEQ ID NO: 28981 - protein, 58 aa, Artificial Sequence; identical to SEQ ID NO: 28980
  Synthetic polypeptide

SEQ ID NO: 28982 - protein, 58 aa, Artificial Sequence; identical to SEQ ID NO: 28980
  Synthetic polypeptide

SEQ ID NO: 28983 - protein, 53 aa, Artificial Sequence; identical to SEQ ID NO: 28851
  Synthetic polypeptide

SEQ ID NO: 28984 - protein, 53 aa, Artificial Sequence; identical to SEQ ID NO: 28851
  Synthetic polypeptide

SEQ ID NO: 28985 - protein, 53 aa, Artificial Sequence; identical to SEQ ID NO: 28851
  Synthetic polypeptide

SEQ ID NO: 28986 - protein, 53 aa, Artificial Sequence; identical to SEQ ID NO: 28851
  Synthetic polypeptide

SEQ ID NO: 28987 - protein, 58 aa, Artificial Sequence; identical to SEQ ID NO: 28980
  Synthetic polypeptide

SEQ ID NO: 28988 - protein, 58 aa, Artificial Sequence; identical to SEQ ID NO: 28980
  Synthetic polypeptide

SEQ ID NO: 28989 - protein, 58 aa, Artificial Sequence; identical to SEQ ID NO: 28980
  Synthetic polypeptide

SEQ ID NO: 28990 - protein, 58 aa, Artificial Sequence; identical to SEQ ID NO: 28980
  Synthetic polypeptide

SEQ ID NO: 28991 - protein, 213 aa, Artificial Sequence; identical to SEQ ID NO: 28854
  Synthetic polypeptide

SEQ ID NO: 28992 - protein, 213 aa, Artificial Sequence; identical to SEQ ID NO: 28929
  Synthetic polypeptide

SEQ ID NO: 28993 - protein, 213 aa, Artificial Sequence; identical to SEQ ID NO: 28929
  Synthetic polypeptide

SEQ ID NO: 28994 - protein, 213 aa, Artificial Sequence; identical to SEQ ID NO: 28929
  Synthetic polypeptide

SEQ ID NO: 28995 - protein, 58 aa, Artificial Sequence; identical to SEQ ID NO: 28980
  Synthetic polypeptide

SEQ ID NO: 28996 - protein, 58 aa, Artificial Sequence; identical to SEQ ID NO: 28980
  Synthetic polypeptide

SEQ ID NO: 28997 - protein, 58 aa, Artificial Sequence; identical to SEQ ID NO: 28980
  Synthetic polypeptide

SEQ ID NO: 28998 - protein, 213 aa, Artificial Sequence; identical to SEQ ID NO: 28887
  Synthetic polypeptide

SEQ ID NO: 28999 - protein, 213 aa, Artificial Sequence; identical to SEQ ID NO: 28887
  Synthetic polypeptide

SEQ ID NO: 29000 - protein, 213 aa, Artificial Sequence; identical to SEQ ID NO: 28887
  Synthetic polypeptide

SEQ ID NO: 29001 - protein, 53 aa, Artificial Sequence; identical to SEQ ID NO: 28890
  Synthetic polypeptide

SEQ ID NO: 29002 - protein, 53 aa, Artificial Sequence; identical to SEQ ID NO: 28890
  Synthetic polypeptide

SEQ ID NO: 29003 - protein, 53 aa, Artificial Sequence; identical to SEQ ID NO: 28890
  Synthetic polypeptide

SEQ ID NO: 29004 - protein, 71 aa, Artificial Sequence
  Synthetic polypeptide
DVSPCTSLPDALGGTFPTTPRGQVSRKCHQWGGATTSLPFCEVPPSLLQQGNKEQETALLQALPCPKQRSL

SEQ ID NO: 29005 - protein, 71 aa, Artificial Sequence; identical to SEQ ID NO: 29004
  Synthetic polypeptide

SEQ ID NO: 29006 - protein, 71 aa, Artificial Sequence; identical to SEQ ID NO: 29004
  Synthetic polypeptide

SEQ ID NO: 29007 - protein, 73 aa, Artificial Sequence; identical to SEQ ID NO: 28893
  Synthetic polypeptide

SEQ ID NO: 29008 - protein, 73 aa, Artificial Sequence; identical to SEQ ID NO: 28893
  Synthetic polypeptide

SEQ ID NO: 29009 - protein, 73 aa, Artificial Sequence; identical to SEQ ID NO: 28893
  Synthetic polypeptide

SEQ ID NO: 29010 - protein, 160 aa, Artificial Sequence; identical to SEQ ID NO: 28896
  Synthetic polypeptide

SEQ ID NO: 29011 - protein, 160 aa, Artificial Sequence; identical to SEQ ID NO: 28896
  Synthetic polypeptide

SEQ ID NO: 29012 - protein, 160 aa, Artificial Sequence; identical to SEQ ID NO: 28896
  Synthetic polypeptide

SEQ ID NO: 29013 - protein, 40 aa, Artificial Sequence; identical to SEQ ID NO: 28833
  Synthetic polypeptide

SEQ ID NO: 29014 - protein, 40 aa, Artificial Sequence; identical to SEQ ID NO: 28833
  Synthetic polypeptide

SEQ ID NO: 29015 - protein, 40 aa, Artificial Sequence; identical to SEQ ID NO: 28833
  Synthetic polypeptide

SEQ ID NO: 29016 - protein, 178 aa, Artificial Sequence; identical to SEQ ID NO: 28908
  Synthetic polypeptide

SEQ ID NO: 29017 - protein, 178 aa, Artificial Sequence; identical to SEQ ID NO: 28908
  Synthetic polypeptide

SEQ ID NO: 29018 - protein, 178 aa, Artificial Sequence; identical to SEQ ID NO: 28908
  Synthetic polypeptide

SEQ ID NO: 29019 - protein, 89 aa, Artificial Sequence
  Synthetic polypeptide
DVSPCTSLPDALGGTFPTTPRGQVSRKCHQWGGATTSLPFCEVPPSLLQQGNVTVLRIRKGRGWPCWQGNKEQETALLQALPCPKQRSL

SEQ ID NO: 29020 - protein, 89 aa, Artificial Sequence; identical to SEQ ID NO: 29019
  Synthetic polypeptide

SEQ ID NO: 29021 - protein, 89 aa, Artificial Sequence; identical to SEQ ID NO: 29019
  Synthetic polypeptide

SEQ ID NO: 29022 - protein, 71 aa, Artificial Sequence
  Synthetic polypeptide
DVSPCTSLPDALGGTFPTTPRGQVSRKCHQWGGATTSLPFCEVPPSLLQQGNKEQETALLQALPCPKKRSL

SEQ ID NO: 29023 - protein, 71 aa, Artificial Sequence; identical to SEQ ID NO: 29022
  Synthetic polypeptide

SEQ ID NO: 29024 - protein, 71 aa, Artificial Sequence; identical to SEQ ID NO: 29022
  Synthetic polypeptide

SEQ ID NO: 29025 - protein, 71 aa, Artificial Sequence; identical to SEQ ID NO: 29022
  Synthetic polypeptide

SEQ ID NO: 29026 - protein, 73 aa, Artificial Sequence; identical to SEQ ID NO: 28950
  Synthetic polypeptide

SEQ ID NO: 29027 - protein, 73 aa, Artificial Sequence; identical to SEQ ID NO: 28950
  Synthetic polypeptide

SEQ ID NO: 29028 - protein, 73 aa, Artificial Sequence; identical to SEQ ID NO: 28950
  Synthetic polypeptide

SEQ ID NO: 29029 - protein, 73 aa, Artificial Sequence; identical to SEQ ID NO: 28950
  Synthetic polypeptide

SEQ ID NO: 29030 - protein, 160 aa, Artificial Sequence; identical to SEQ ID NO: 28954
  Synthetic polypeptide

SEQ ID NO: 29031 - protein, 160 aa, Artificial Sequence; identical to SEQ ID NO: 28955
  Synthetic polypeptide

SEQ ID NO: 29032 - protein, 160 aa, Artificial Sequence; identical to SEQ ID NO: 28955
  Synthetic polypeptide

SEQ ID NO: 29033 - protein, 160 aa, Artificial Sequence; identical to SEQ ID NO: 28955
  Synthetic polypeptide

SEQ ID NO: 29034 - protein, 40 aa, Artificial Sequence; identical to SEQ ID NO: 28833
  Synthetic polypeptide

SEQ ID NO: 29035 - protein, 40 aa, Artificial Sequence; identical to SEQ ID NO: 28833
  Synthetic polypeptide

SEQ ID NO: 29036 - protein, 40 aa, Artificial Sequence; identical to SEQ ID NO: 28833
  Synthetic polypeptide

SEQ ID NO: 29037 - protein, 40 aa, Artificial Sequence; identical to SEQ ID NO: 28833
  Synthetic polypeptide

SEQ ID NO: 29038 - protein, 178 aa, Artificial Sequence; identical to SEQ ID NO: 28812
  Synthetic polypeptide

SEQ ID NO: 29039 - protein, 89 aa, Artificial Sequence
  Synthetic polypeptide
DVSPCTSLPDALGGTFPTTPRGQVSRKCHQWGGATTSLPFCEVPPSLLQQGNVTVLRIRKGRGWPCWQGNKEQETALLQALPCPKKRSL

SEQ ID NO: 29040 - protein, 89 aa, Artificial Sequence; identical to SEQ ID NO: 29039
  Synthetic polypeptide

SEQ ID NO: 29041 - protein, 89 aa, Artificial Sequence; identical to SEQ ID NO: 29039
  Synthetic polypeptide

SEQ ID NO: 29042 - protein, 89 aa, Artificial Sequence; identical to SEQ ID NO: 29039
  Synthetic polypeptide

SEQ ID NO: 29043 - protein, 178 aa, Artificial Sequence; identical to SEQ ID NO: 28971
  Synthetic polypeptide

SEQ ID NO: 29044 - protein, 178 aa, Artificial Sequence; identical to SEQ ID NO: 28971
  Synthetic polypeptide

SEQ ID NO: 29045 - protein, 178 aa, Artificial Sequence; identical to SEQ ID NO: 28971
  Synthetic polypeptide

SEQ ID NO: 29046 - protein, 71 aa, Artificial Sequence; identical to SEQ ID NO: 29004
  Synthetic polypeptide

SEQ ID NO: 29047 - protein, 71 aa, Artificial Sequence; identical to SEQ ID NO: 29004
  Synthetic polypeptide

SEQ ID NO: 29048 - protein, 71 aa, Artificial Sequence; identical to SEQ ID NO: 29004
  Synthetic polypeptide

SEQ ID NO: 29049 - protein, 73 aa, Artificial Sequence; identical to SEQ ID NO: 28893
  Synthetic polypeptide

SEQ ID NO: 29050 - protein, 73 aa, Artificial Sequence; identical to SEQ ID NO: 28893
  Synthetic polypeptide

SEQ ID NO: 29051 - protein, 73 aa, Artificial Sequence; identical to SEQ ID NO: 28893
  Synthetic polypeptide

SEQ ID NO: 29052 - protein, 160 aa, Artificial Sequence; identical to SEQ ID NO: 28896
  Synthetic polypeptide

SEQ ID NO: 29053 - protein, 160 aa, Artificial Sequence; identical to SEQ ID NO: 28896
  Synthetic polypeptide

SEQ ID NO: 29054 - protein, 160 aa, Artificial Sequence; identical to SEQ ID NO: 28896
  Synthetic polypeptide

SEQ ID NO: 29055 - protein, 40 aa, Artificial Sequence; identical to SEQ ID NO: 28833
  Synthetic polypeptide

SEQ ID NO: 29056 - protein, 40 aa, Artificial Sequence; identical to SEQ ID NO: 28833
  Synthetic polypeptide

SEQ ID NO: 29057 - protein, 40 aa, Artificial Sequence; identical to SEQ ID NO: 28833
  Synthetic polypeptide

SEQ ID NO: 29058 - protein, 178 aa, Artificial Sequence; identical to SEQ ID NO: 28908
  Synthetic polypeptide

SEQ ID NO: 29059 - protein, 178 aa, Artificial Sequence; identical to SEQ ID NO: 28908
  Synthetic polypeptide

SEQ ID NO: 29060 - protein, 178 aa, Artificial Sequence; identical to SEQ ID NO: 28908
  Synthetic polypeptide

SEQ ID NO: 29061 - protein, 89 aa, Artificial Sequence; identical to SEQ ID NO: 29019
  Synthetic polypeptide

SEQ ID NO: 29062 - protein, 89 aa, Artificial Sequence; identical to SEQ ID NO: 29019
  Synthetic polypeptide

SEQ ID NO: 29063 - protein, 89 aa, Artificial Sequence; identical to SEQ ID NO: 29019
  Synthetic polypeptide

SEQ ID NO: 29064 - protein, 34 aa, Artificial Sequence
  Synthetic polypeptide
LPNGKFLQSYNSGEAPQLHCHFVRCCRPSSGKGM

SEQ ID NO: 29065 - protein, 34 aa, Artificial Sequence; identical to SEQ ID NO: 29064
  Synthetic polypeptide

SEQ ID NO: 29066 - protein, 34 aa, Artificial Sequence; identical to SEQ ID NO: 29064
  Synthetic polypeptide

SEQ ID NO: 29067 - protein, 34 aa, Artificial Sequence; identical to SEQ ID NO: 29064
  Synthetic polypeptide

SEQ ID NO: 29068 - protein, 84 aa, Artificial Sequence
  Synthetic polypeptide
ASLPSTRGGTFPITPKRQVSTKLQQWGGATTSLPFCEVLPPLLRQGNVTVLRIRKGRGWPCWQGNKEQETALLQALPCPKKRSL

SEQ ID NO: 29069 - protein, 84 aa, Artificial Sequence; identical to SEQ ID NO: 29068
  Synthetic polypeptide

SEQ ID NO: 29070 - protein, 84 aa, Artificial Sequence; identical to SEQ ID NO: 29068
  Synthetic polypeptide

SEQ ID NO: 29071 - protein, 84 aa, Artificial Sequence; identical to SEQ ID NO: 29068
  Synthetic polypeptide

SEQ ID NO: 29072 - protein, 178 aa, Artificial Sequence
  Synthetic polypeptide
GAAAPPPARECDSPSYQKRQRMALLARKQGAGDSLIAGSAMSKEKKLMTGHAIPPSQLDSQIDDFTGFSKDRMMQKPGSNAPVGGNVTSSFSGDDLECRETASSPKSQQEINADIKRKLVKELRCVGQKYEKIFEMLEGVQGPTAVRKRFFESIIKEAARCMRRDFVKHLKKKLKRMI

SEQ ID NO: 29073 - protein, 178 aa, Artificial Sequence
  Synthetic polypeptide
GAAAPPPARECDSPSYQKRQRMALLARKQGAGDSLIAGSAMSKEKKLMTGHAIPPSQLDSQIDDFTGFSKDGMMQKPGSNAPVGGNVTSNFSGDDLECRGIASSPKSQQEINADIKCQVVKEIRCLGRKYEKIFEMLEGVQGPTAVRKRFFESIIKEAARCMRRDFVKHLKKKLKRMI

SEQ ID NO: 29074 - protein, 178 aa, Artificial Sequence; identical to SEQ ID NO: 29073
  Synthetic polypeptide

SEQ ID NO: 29075 - protein, 178 aa, Artificial Sequence; identical to SEQ ID NO: 29073
  Synthetic polypeptide

SEQ ID NO: 29076 - protein, 84 aa, Artificial Sequence
  Synthetic polypeptide
ASLPSTRGGTFPITPKRQVSTKLQQWGGATTSLPFCEVLPPLLRQGNVTVLRIRKGRGWPCWQGNKEQETALLQALPCPKQRSL

SEQ ID NO: 29077 - protein, 84 aa, Artificial Sequence; identical to SEQ ID NO: 29076
  Synthetic polypeptide

SEQ ID NO: 29078 - protein, 84 aa, Artificial Sequence; identical to SEQ ID NO: 29076
  Synthetic polypeptide

SEQ ID NO: 29079 - protein, 34 aa, Artificial Sequence; identical to SEQ ID NO: 29064
  Synthetic polypeptide

SEQ ID NO: 29080 - protein, 34 aa, Artificial Sequence; identical to SEQ ID NO: 29064
  Synthetic polypeptide

SEQ ID NO: 29081 - protein, 34 aa, Artificial Sequence; identical to SEQ ID NO: 29064
  Synthetic polypeptide

SEQ ID NO: 29082 - protein, 178 aa, Artificial Sequence
  Synthetic polypeptide
GAAAPPPARECDSPSYQKRQRMALLARKQGAGDSLIAGSAMSKAKKLMTGHAIPPSQLDSQIDDFTGFSKDRMMQKPGSNAPVGGNVTSSFSGDDLECRETASSPKSQQEINADIKRKLVKELRCVGQKYEKIFEMLEGVQGPTAVRKRFFESIIKEAARCMRRDFVKHLKKKLKRMI

SEQ ID NO: 29083 - protein, 178 aa, Artificial Sequence; identical to SEQ ID NO: 29082
  Synthetic polypeptide

SEQ ID NO: 29084 - protein, 178 aa, Artificial Sequence; identical to SEQ ID NO: 29082
  Synthetic polypeptide

SEQ ID NO: 29085 - protein, 270 aa, Artificial Sequence
  Synthetic polypeptide
DHGCFECCIKCLGGVPYASLVATILCFSGVALFCGCGHVALAGTVAILEQHFSTNASDHALLSEVIQLMQYVIYGIASFFFLYGIILLAEGFYTTSAVKELHGEFKTTACGRCISGMFVFLTYVLGVAWLGVFGFSAVPVFMFYNIWSTCEVIKSPQTNGTTGVEQICVDIRQYGIIPWNAFPGKICGSALENICNTNEFYMSYHLFIVACAGAGATVIALIHFLMILSSNWAYLKDASKMQAYQDIKAKEEQELQDIQSRSKEQLNSYT

SEQ ID NO: 29086 - protein, 270 aa, Artificial Sequence; identical to SEQ ID NO: 29085
  Synthetic polypeptide

SEQ ID NO: 29087 - protein, 90 aa, Artificial Sequence
  Synthetic polypeptide
LCHSLPFQILSKLSYIPFWSLRVLTAECEITAALNAASSVWEESPTPPWWPPSSASPGWPYSAAVGMWLSQAPWRFLSNTSPPTPVTMPC

SEQ ID NO: 29088 - protein, 90 aa, Artificial Sequence; identical to SEQ ID NO: 29087
  Synthetic polypeptide

SEQ ID NO: 29089 - protein, 90 aa, Artificial Sequence; identical to SEQ ID NO: 29087
  Synthetic polypeptide

SEQ ID NO: 29090 - protein, 90 aa, Artificial Sequence; identical to SEQ ID NO: 29087
  Synthetic polypeptide

SEQ ID NO: 29091 - protein, 90 aa, Artificial Sequence; identical to SEQ ID NO: 29087
  Synthetic polypeptide

SEQ ID NO: 29092 - protein, 90 aa, Artificial Sequence; identical to SEQ ID NO: 29087
  Synthetic polypeptide

SEQ ID NO: 29093 - protein, 20 aa, Artificial Sequence
  Synthetic polypeptide
VTFPFGASGSSPQNVRSRLL

SEQ ID NO: 29094 - protein, 20 aa, Artificial Sequence
  Synthetic polypeptide
VTFPFGASGSSPQNVRSRLL

SEQ ID NO: 29095 - protein, 20 aa, Artificial Sequence
  Synthetic polypeptide
VTFPFGASGSSPQNVRSRLL

SEQ ID NO: 29096 - protein, 20 aa, Artificial Sequence
  Synthetic polypeptide
VTFPFGASGSSPQNVRSRLL

SEQ ID NO: 29097 - protein, 20 aa, Artificial Sequence
  Synthetic polypeptide
VTFPFGASGSSPQNVRSRLL

SEQ ID NO: 29098 - protein, 20 aa, Artificial Sequence
  Synthetic polypeptide
VTFPFGASGSSPQNVRSRLL

SEQ ID NO: 29099 - protein, 247 aa, Artificial Sequence
  Synthetic polypeptide
DHGCFECCIKCLGGVPYASLVATILCFSGVALFCGCGHVALAGTVAILEQHFSTNASDHALLSEVIQLMQYVIYGIASFFFLYGIILLAEGFYTTSAVKELHGEFKTTACGRCISGMFVFLTYVLGVAWLGVFGFSAVPVFMFYNIWSTCEVIKSPQTNGTTGVEQICVDIRQYGIIPWNAFPGKICGSALENICNTNEFYMSYHLFIVACAGAGATVIALLIYMMATTYNYAVLKFKSREDCCTKF

SEQ ID NO: 29100 - protein, 247 aa, Artificial Sequence; identical to SEQ ID NO: 29099
  Synthetic polypeptide

SEQ ID NO: 29101 - protein, 247 aa, Artificial Sequence; identical to SEQ ID NO: 29099
  Synthetic polypeptide

SEQ ID NO: 29102 - protein, 89 aa, Artificial Sequence
  Synthetic polypeptide
DHGCFECCIKCLGGVPYASLVATILCFSGVALFCGCGHVALAGTVAILEQHFSTNASDHALLSEVIQLMQYVIYGIASFFFLYGIILLA

SEQ ID NO: 29103 - protein, 287 aa, Artificial Sequence
  Synthetic polypeptide
MGLTRSDGFENRSFSAQALCLPAVVHIRCDLLLLAFLHDCEASPATWNFLDDAPPGTQEYIMLRQDSIQSAELKKKESPFRAKCHEIFCCPLKQVHHKENTEPEEPQLKGIVTKLYSRQGYHLQLQADGTIDGTKDEDSTYTLFNLIPVGLRVVAIQGVQTKLYLAMNSEGYLYTSELFTPECKFKESVFENYYVTYSSMIYRQQQSGRGWYLGLNKEGEIMKGNHVKKNKPAAHFLPKPLKVAMYKEPSLHDLTEFSRSGSGTPTKSRSVSGVLNGGKSMSHNEST

SEQ ID NO: 29104 - protein, 45 aa, Artificial Sequence
  Synthetic polypeptide
DVTCSCLPSSMIVRPPQPRGTFWMTPPLAHRNTLCYDKIPSNLRN

SEQ ID NO: 29105 - protein, 45 aa, Artificial Sequence; identical to SEQ ID NO: 29104
  Synthetic polypeptide

SEQ ID NO: 29106 - protein, 45 aa, Artificial Sequence; identical to SEQ ID NO: 29104
  Synthetic polypeptide

SEQ ID NO: 29107 - protein, 45 aa, Artificial Sequence; identical to SEQ ID NO: 29104
  Synthetic polypeptide

SEQ ID NO: 29108 - protein, 10 aa, Artificial Sequence
  Synthetic polypeptide
GLPSHVELSG

SEQ ID NO: 29109 - protein, 10 aa, Artificial Sequence
  Synthetic polypeptide
GLPSHVELSG

SEQ ID NO: 29110 - protein, 10 aa, Artificial Sequence
  Synthetic polypeptide
GLPSHVELSG

SEQ ID NO: 29111 - protein, 10 aa, Artificial Sequence
  Synthetic polypeptide
GLPSHVELSG

SEQ ID NO: 29112 - protein, 253 aa, Artificial Sequence
  Synthetic polypeptide
MGLTRSDGFENRSFSAQALCLPAVVHIRCDLLLLAFLHDCEASPATWNFLDDAPPGTQEYIMLRQDSIQSAELKKKESPFRAKCHEIFCCPLKQVHHKENTEPEEPQLKGIVTKLYSRQGYHLQLQADGTIDGTKDEDSTYTLFNLIPVGLRVVAIQGVQTKLYLAMNSEGYLYTSELFTPECKFKESVFENYYVTYSSMIYRQQQSGRGWYLGLNKEGEIMKGNHVKKNKPAAHFLPKPLKVAMYKEPSLHD

SEQ ID NO: 29113 - protein, 232 aa, Artificial Sequence
  Synthetic polypeptide
MGLTRSDGFENRSFSAQALCLPAVVHIRCDLLLLAFLHDCEASPATWNFLDDAPPGTQEYIMLRQDSIQSAELKKKESPFRAKCHEIFCCPLKQVHHKENTEPEEPQLKGIVTKLYSRQGYHLQLQADGTIDGTKDEDSTYTLFNLIPVGLRVVAIQGVQTKLYLAMNSEGYLYTSELFTPECKFKESVFENYYVTYSSMIYRQQQSGRGWYLGLNKEGEIMKGNHVKKNKP

SEQ ID NO: 29114 - protein, 130 aa, Artificial Sequence
  Synthetic polypeptide
MGLTRSDGFENRSFSAQALCLPAVVHIRCDLLLLAFLHDCEASPATWNFLDDAPPGTQEYIMLRQDSIQSAELKKKESPFRAKCHEIFCCPLKQVHHKENTEPEEPQLKGIVTKLYSRQGYHLQLQADGT

SEQ ID NO: 29115 - protein, 65 aa, Artificial Sequence
  Synthetic polypeptide
TVSFMKAALNAASSVWEESPTPPWWPPSSASPGWPYSAAVGMWLSQAPWRFLSNTSPPTPVTMPC

SEQ ID NO: 29116 - protein, 65 aa, Artificial Sequence; identical to SEQ ID NO: 29115
  Synthetic polypeptide

SEQ ID NO: 29117 - protein, 65 aa, Artificial Sequence; identical to SEQ ID NO: 29115
  Synthetic polypeptide

SEQ ID NO: 29118 - protein, 65 aa, Artificial Sequence; identical to SEQ ID NO: 29115
  Synthetic polypeptide

SEQ ID NO: 29119 - protein, 65 aa, Artificial Sequence; identical to SEQ ID NO: 29115
  Synthetic polypeptide

SEQ ID NO: 29120 - protein, 65 aa, Artificial Sequence; identical to SEQ ID NO: 29115
  Synthetic polypeptide

SEQ ID NO: 29121 - protein, 280 aa, Artificial Sequence
  Synthetic polypeptide
VCLSPLNCQLHEGCFECCIKCLGGVPYASLVATILCFSGVALFCGCGHVALAGTVAILEQHFSTNASDHALLSEVIQLMQYVIYGIASFFFLYGIILLAEGFYTTSAVKELHGEFKTTACGRCISGMFVFLTYVLGVAWLGVFGFSAVPVFMFYNIWSTCEVIKSPQTNGTTGVEQICVDIRQYGIIPWNAFPGKICGSALENICNTNEFYMSYHLFIVACAGAGATVIALIHFLMILSSNWAYLKDASKMQAYQDIKAKEEQELQDIQSRSKEQLNSYT

SEQ ID NO: 29122 - protein, 280 aa, Artificial Sequence; identical to SEQ ID NO: 29121
  Synthetic polypeptide

SEQ ID NO: 29123 - protein, 257 aa, Artificial Sequence
  Synthetic polypeptide
VCLSPLNCQLHEGCFECCIKCLGGVPYASLVATILCFSGVALFCGCGHVALAGTVAILEQHFSTNASDHALLSEVIQLMQYVIYGIASFFFLYGIILLAEGFYTTSAVKELHGEFKTTACGRCISGMFVFLTYVLGVAWLGVFGFSAVPVFMFYNIWSTCEVIKSPQTNGTTGVEQICVDIRQYGIIPWNAFPGKICGSALENICNTNEFYMSYHLFIVACAGAGATVIALLIYMMATTYNYAVLKFKSREDCCTKF

SEQ ID NO: 29124 - protein, 257 aa, Artificial Sequence; identical to SEQ ID NO: 29123
  Synthetic polypeptide

SEQ ID NO: 29125 - protein, 257 aa, Artificial Sequence; identical to SEQ ID NO: 29123
  Synthetic polypeptide

SEQ ID NO: 29126 - protein, 99 aa, Artificial Sequence
  Synthetic polypeptide
VCLSPLNCQLHEGCFECCIKCLGGVPYASLVATILCFSGVALFCGCGHVALAGTVAILEQHFSTNASDHALLSEVIQLMQYVIYGIASFFFLYGIILLA

SEQ ID NO: 29127 - protein, 63 aa, Artificial Sequence
  Synthetic polypeptide
RVCVAALNAASSVWEESPTPPWWPPSSASPGWPYSAAVGMWLSQAPWRFLSNTSPPTPVTMPC

SEQ ID NO: 29128 - protein, 63 aa, Artificial Sequence; identical to SEQ ID NO: 29127
  Synthetic polypeptide

SEQ ID NO: 29129 - protein, 63 aa, Artificial Sequence; identical to SEQ ID NO: 29127
  Synthetic polypeptide

SEQ ID NO: 29130 - protein, 63 aa, Artificial Sequence; identical to SEQ ID NO: 29127
  Synthetic polypeptide

SEQ ID NO: 29131 - protein, 63 aa, Artificial Sequence; identical to SEQ ID NO: 29127
  Synthetic polypeptide

SEQ ID NO: 29132 - protein, 63 aa, Artificial Sequence; identical to SEQ ID NO: 29127
  Synthetic polypeptide

SEQ ID NO: 29133 - protein, 6 aa, Artificial Sequence
  Synthetic polypeptide
ESAWLL

SEQ ID NO: 29134 - protein, 6 aa, Artificial Sequence
  Synthetic polypeptide
ESAWLL

SEQ ID NO: 29135 - protein, 6 aa, Artificial Sequence
  Synthetic polypeptide
ESAWLL

SEQ ID NO: 29136 - protein, 6 aa, Artificial Sequence
  Synthetic polypeptide
ESAWLL

SEQ ID NO: 29137 - protein, 6 aa, Artificial Sequence
  Synthetic polypeptide
ESAWLL

SEQ ID NO: 29138 - protein, 6 aa, Artificial Sequence
  Synthetic polypeptide
ESAWLL

SEQ ID NO: 29139 - protein, 271 aa, Artificial Sequence
  Synthetic polypeptide
SLRGCFECCIKCLGGVPYASLVATILCFSGVALFCGCGHVALAGTVAILEQHFSTNASDHALLSEVIQLMQYVIYGIASFFFLYGIILLAEGFYTTSAVKELHGEFKTTACGRCISGMFVFLTYVLGVAWLGVFGFSAVPVFMFYNIWSTCEVIKSPQTNGTTGVEQICVDIRQYGIIPWNAFPGKICGSALENICNTNEFYMSYHLFIVACAGAGATVIALIHFLMILSSNWAYLKDASKMQAYQDIKAKEEQELQDIQSRSKEQLNSYT

SEQ ID NO: 29140 - protein, 271 aa, Artificial Sequence; identical to SEQ ID NO: 29139
  Synthetic polypeptide

SEQ ID NO: 29141 - protein, 248 aa, Artificial Sequence
  Synthetic polypeptide
SLRGCFECCIKCLGGVPYASLVATILCFSGVALFCGCGHVALAGTVAILEQHFSTNASDHALLSEVIQLMQYVIYGIASFFFLYGIILLAEGFYTTSAVKELHGEFKTTACGRCISGMFVFLTYVLGVAWLGVFGFSAVPVFMFYNIWSTCEVIKSPQTNGTTGVEQICVDIRQYGIIPWNAFPGKICGSALENICNTNEFYMSYHLFIVACAGAGATVIALLIYMMATTYNYAVLKFKSREDCCTKF

SEQ ID NO: 29142 - protein, 248 aa, Artificial Sequence; identical to SEQ ID NO: 29141
  Synthetic polypeptide

SEQ ID NO: 29143 - protein, 248 aa, Artificial Sequence; identical to SEQ ID NO: 29141
  Synthetic polypeptide

SEQ ID NO: 29144 - protein, 90 aa, Artificial Sequence
  Synthetic polypeptide
SLRGCFECCIKCLGGVPYASLVATILCFSGVALFCGCGHVALAGTVAILEQHFSTNASDHALLSEVIQLMQYVIYGIASFFFLYGIILLA

SEQ ID NO: 29145 - protein, 35 aa, Artificial Sequence
  Synthetic polypeptide
QPTFLKKKKKKHTSGKSARATLPLCHIWIHRSAAS

SEQ ID NO: 29146 - protein, 35 aa, Artificial Sequence; identical to SEQ ID NO: 29145
  Synthetic polypeptide

SEQ ID NO: 29147 - protein, 35 aa, Artificial Sequence; identical to SEQ ID NO: 29145
  Synthetic polypeptide

SEQ ID NO: 29148 - protein, 35 aa, Artificial Sequence; identical to SEQ ID NO: 29145
  Synthetic polypeptide

SEQ ID NO: 29149 - protein, 62 aa, Artificial Sequence
  Synthetic polypeptide
PDNRHFLKKKKKSTPAENPPELLCLCVIFGYTGRPPLECFGRSSAGQQHHHCIYLGSWVGSR

SEQ ID NO: 29150 - protein, 62 aa, Artificial Sequence; identical to SEQ ID NO: 29149
  Synthetic polypeptide

SEQ ID NO: 29151 - protein, 62 aa, Artificial Sequence; identical to SEQ ID NO: 29149
  Synthetic polypeptide

SEQ ID NO: 29152 - protein, 265 aa, Artificial Sequence
  Synthetic polypeptide
KKKKKAHQRKIRQSYFASVSYLDTQVGRLLSALDDLQLANSTIIAFTSDHGWALGEHGEWAKYSNFDVATHVPLIFYVPGRTASLPEAGEKLFPYLDPFDSASQLMEPGRQSMDLVELVSLFPTLAGLAGLQVPPRCPVPSFHVELCREGKNLLKHFRFRDLEEDPYLPGNPRELIAYSQYPRPSDIPQWNSDKPSLKDIKIMGYSIRTIDYRYTVWVGFNPDEFLANFSDIHAGELYFVDSDPLQDHNMYNDSQGGDLFQLLMP

SEQ ID NO: 29153 - protein, 265 aa, Artificial Sequence; identical to SEQ ID NO: 29152
  Synthetic polypeptide

SEQ ID NO: 29154 - protein, 265 aa, Artificial Sequence; identical to SEQ ID NO: 29152
  Synthetic polypeptide

SEQ ID NO: 29155 - protein, 66 aa, Artificial Sequence
  Synthetic polypeptide
PDNRHFLKKKKKSTPAENPPELLCLCVIFGYTGRPPLECFGRSSAGQQHHHCIYLGSWFPHEDKYL

SEQ ID NO: 29156 - protein, 58 aa, Artificial Sequence
  Synthetic polypeptide
KKKKKAHQRKIRQSYFASVSYLDTQVGRLLSALDDLQLANSTIIAFTSDHGFLMRTNT

SEQ ID NO: 29157 - protein, 14 aa, Artificial Sequence
  Synthetic polypeptide
STQHSPWNKRDGTM

SEQ ID NO: 29158 - protein, 14 aa, Artificial Sequence
  Synthetic polypeptide
STQHSPWNKRDGTM

SEQ ID NO: 29159 - protein, 14 aa, Artificial Sequence
  Synthetic polypeptide
STQHSPWNKRDGTM

SEQ ID NO: 29160 - protein, 51 aa, Artificial Sequence
  Synthetic polypeptide
EALPPRITVRMTWEEPCEALSTVLGTREMEPCNHHDQEASNHQSSSKYFRK

SEQ ID NO: 29161 - protein, 51 aa, Artificial Sequence; identical to SEQ ID NO: 29160
  Synthetic polypeptide

SEQ ID NO: 29162 - protein, 51 aa, Artificial Sequence; identical to SEQ ID NO: 29160
  Synthetic polypeptide

SEQ ID NO: 29163 - protein, 185 aa, Artificial Sequence
  Synthetic polypeptide
HGRSHVKHSAQSLEQERWNHVTTTTKRPVTTRAPANTLGNDFDLADALDDRNDRDDGRRKPIAGGGGFSDKDLEDIVGGGEYKPDKGKGDGRYGSNDDPGSGMVAEPGTIAGVASALAMALIGAVSSYISYQQKKFCFSIQQGLNADYVKGENLEAVVCEEPQVKYSTLHTQSAEPPPPPEPARI

SEQ ID NO: 29164 - protein, 185 aa, Artificial Sequence; identical to SEQ ID NO: 29163
  Synthetic polypeptide

SEQ ID NO: 29165 - protein, 117 aa, Artificial Sequence
  Synthetic polypeptide
HGRSHVKHSAQSLEQERWNHVTTTTKRPVTTRAPANTLGNDFDLADALDDRNDRDDGRRKPIAGGGGFSDKDLEDIVGGGEYKPDKGKGDGRYGSNDDPGSGGFLNPEAPVGHVKGK

SEQ ID NO: 29166 - protein, 116 aa, Artificial Sequence
  Synthetic polypeptide
GQEFENSLASMGSQLPKPRMLRESGHGDAHLQEYAGNFQGIRFHYDRNPGTDAVAQTSLEEFNVLEMEVMRRQLYAVNRRLRALEEQGATWRHRETLIIAVLVSASIANLWLWMNQ

SEQ ID NO: 29167 - protein, 29 aa, Artificial Sequence
  Synthetic polypeptide
EEEADGSLEARSSRTVWPAWGPSCQSPEC

SEQ ID NO: 29168 - protein, 58 aa, Artificial Sequence
  Synthetic polypeptide
SQHSERRRRTDHLRPGVREQSGQHGVPAAKAQNAERIRPWGCPSPGVRWQFPRHTFPL

SEQ ID NO: 29169 - protein, 315 aa, Artificial Sequence
  Synthetic polypeptide
FLHFHLRLTIHAECPMHLEDFPMDVHACPLKFGSYAYTTAEVVYSWTLGKNKSVEVAQDGSRLNQYDLLGHVVGTEIIRSSTGEYVVMTTHFHLKRKIGYFVIQTYLPCIMTVILSQVSFWLNRESVPARTVFGVTTVLTMTTLSISARNSLPKVAYATAMDWFIAVCYAFVFSALIEFATVNYFTKRSWAWEGKKVPEALEMKKKTPAAPAKKTSTTFNIVGTTYPINLAKDTEFSTISKGAAPSASSTPTIIASPKATYVQDSPTETKTYNSVSKVDKISRIIFPVLFAIFNLVYWATYVNRESAIKGMIRKQ

SEQ ID NO: 29170 - protein, 315 aa, Artificial Sequence; identical to SEQ ID NO: 29169
  Synthetic polypeptide

SEQ ID NO: 29171 - protein, 36 aa, Artificial Sequence
  Synthetic polypeptide
RSQDGRIGTAPVYSSQRERRRRRVISAFPSEVNNSC

SEQ ID NO: 29172 - protein, 36 aa, Artificial Sequence; identical to SEQ ID NO: 29171
  Synthetic polypeptide

SEQ ID NO: 29173 - protein, 66 aa, Artificial Sequence
  Synthetic polypeptide
GCKQSLALVQAWPPTFGRPGAVLSLGLHIPVAKGDQSPQHRRSGGCPREPFPPLPGHGTGDGWRAV

SEQ ID NO: 29174 - protein, 66 aa, Artificial Sequence; identical to SEQ ID NO: 29173
  Synthetic polypeptide

SEQ ID NO: 29175 - protein, 66 aa, Artificial Sequence; identical to SEQ ID NO: 29173
  Synthetic polypeptide

SEQ ID NO: 29176 - protein, 66 aa, Artificial Sequence; identical to SEQ ID NO: 29173
  Synthetic polypeptide

SEQ ID NO: 29177 - protein, 66 aa, Artificial Sequence; identical to SEQ ID NO: 29173
  Synthetic polypeptide

SEQ ID NO: 29178 - protein, 66 aa, Artificial Sequence; identical to SEQ ID NO: 29173
  Synthetic polypeptide

SEQ ID NO: 29179 - protein, 66 aa, Artificial Sequence; identical to SEQ ID NO: 29173
  Synthetic polypeptide

SEQ ID NO: 29180 - protein, 66 aa, Artificial Sequence; identical to SEQ ID NO: 29173
  Synthetic polypeptide

SEQ ID NO: 29181 - protein, 302 aa, Artificial Sequence
  Synthetic polypeptide
SRPGHQPLGGLGQCSLWACTSLWQREISHPNIVALEDVHESPSHLYLAMELVTGGELFDRIMERGSYTEKDASHLVGQVLGAVSYLHSLGIVHRDLKPENLLYATPFEDSKIMVSDFGLSKIQAGNMLGTACGTPGYVAPELLEQKPYGKAVDVWALGVISYILLCGYPPFYDESDPELFSQILRASYEFDSPFWDDISESAKDFIRHLLERDPQKRFTCQQALRHLWISGDTAFDRDILGSVSEQIRKNFARTHWKRAFNATSFLRHIRKLGQIPEGEGASEQGMARHSHSGLRAGQPPKW

SEQ ID NO: 29182 - protein, 302 aa, Artificial Sequence; identical to SEQ ID NO: 29181
  Synthetic polypeptide

SEQ ID NO: 29183 - protein, 302 aa, Artificial Sequence; identical to SEQ ID NO: 29181
  Synthetic polypeptide

SEQ ID NO: 29184 - protein, 302 aa, Artificial Sequence; identical to SEQ ID NO: 29181
  Synthetic polypeptide

SEQ ID NO: 29185 - protein, 59 aa, Artificial Sequence
  Synthetic polypeptide
VQAVLGSSPGLATNLWEAWGSALSGPAHPCGKGRSVTPTSSLWRMSTRALPTSTWPWNW

SEQ ID NO: 29186 - protein, 59 aa, Artificial Sequence; identical to SEQ ID NO: 29185
  Synthetic polypeptide

SEQ ID NO: 29187 - protein, 59 aa, Artificial Sequence; identical to SEQ ID NO: 29185
  Synthetic polypeptide

SEQ ID NO: 29188 - protein, 59 aa, Artificial Sequence; identical to SEQ ID NO: 29185
  Synthetic polypeptide

SEQ ID NO: 29189 - protein, 59 aa, Artificial Sequence; identical to SEQ ID NO: 29185
  Synthetic polypeptide

SEQ ID NO: 29190 - protein, 59 aa, Artificial Sequence; identical to SEQ ID NO: 29185
  Synthetic polypeptide

SEQ ID NO: 29191 - protein, 59 aa, Artificial Sequence; identical to SEQ ID NO: 29185
  Synthetic polypeptide

SEQ ID NO: 29192 - protein, 59 aa, Artificial Sequence; identical to SEQ ID NO: 29185
  Synthetic polypeptide

SEQ ID NO: 29193 - protein, 59 aa, Artificial Sequence; identical to SEQ ID NO: 29185
  Synthetic polypeptide

SEQ ID NO: 29194 - protein, 59 aa, Artificial Sequence; identical to SEQ ID NO: 29185
  Synthetic polypeptide

SEQ ID NO: 29195 - protein, 325 aa, Artificial Sequence
  Synthetic polypeptide
SRPGHQPLGGLGQCSLWACTSLWQREISHPNIVALEDVHESPSHLYLAMELVTGGELFDRIMERGSYTEKDASHLVGQVLGAVSYLHSLGIVHRDLKPENLLYATPFEDSKIMVSDFGLSKIQAGNMLGTACGTPGYAEPVTLSGMAACVPVRASVCLWPPAPELLEQKPYGKAVDVWALGVISYILLCGYPPFYDESDPELFSQILRASYEFDSPFWDDISESAKDFIRHLLERDPQKRFTCQQALRHLWISGDTAFDRDILGSVSEQIRKNFARTHWKRAFNATSFLRHIRKLGQIPEGEGASEQGMARHSHSGLRAGQPPKW

SEQ ID NO: 29196 - protein, 325 aa, Artificial Sequence; identical to SEQ ID NO: 29195
  Synthetic polypeptide

SEQ ID NO: 29197 - protein, 185 aa, Artificial Sequence
  Synthetic polypeptide
SRPGHQPLGGLGQCSLWACTSLWQREISHPNIVALEDVHESPSHLYLAMELVTGGELFDRIMERGSYTEKDASHLVGQVLGAVSYLHSLGIVHRDLKPENLLYATPFEDSKIMVSDFGLSKIQAGNMLGTACGTPGYVAPELLEQKPYGKAVDVWALGVISYILLCGYPPFYDESDPELFSQILR

SEQ ID NO: 29198 - protein, 60 aa, Artificial Sequence
  Synthetic polypeptide
GCKQSLALVQAWPPTFGRPGAVLSLGLHIPVAKGDQSPQHRRSGGCPREPFPPLPGHGTG

SEQ ID NO: 29199 - protein, 60 aa, Artificial Sequence; identical to SEQ ID NO: 29198
  Synthetic polypeptide

SEQ ID NO: 29200 - protein, 52 aa, Artificial Sequence
  Synthetic polypeptide
SRPGHQPLGGLGQCSLWACTSLWQREISHPNIVALEDVHESPSHLYLAMELV

SEQ ID NO: 29201 - protein, 52 aa, Artificial Sequence; identical to SEQ ID NO: 29200
  Synthetic polypeptide

SEQ ID NO: 29202 - protein, 183 aa, Artificial Sequence
  Synthetic polypeptide
SRPGHQPLGGLGQCSLWACTSLWQREISHPNIVALEDVHESPSHLYLAMELVTGGELFDRIMERGSYTEKDASHLVGQVLGAVSYLHSLGIVHRDLKPENLLYATPFEDSKIMVSDFGLSKIQAGNMLGTACGTPGYVAPELLEQKPYGKAVDVWALGVISYILLCGYPPFYDESDPELFSQI

SEQ ID NO: 29203 - protein, 55 aa, Artificial Sequence
  Synthetic polypeptide
GCKQSLALVQAWPPTFGRPGAVLSLGLHIPVAKGDQSPQHRRSGGCPREPFPPLP

SEQ ID NO: 29204 - protein, 47 aa, Artificial Sequence
  Synthetic polypeptide
SRPGHQPLGGLGQCSLWACTSLWQREISHPNIVALEDVHESPSHLYL

SEQ ID NO: 29205 - protein, 54 aa, Artificial Sequence
  Synthetic polypeptide
VQAVLGSSPGLATNLWEAWGSALSGPAHPCGKGRSVTPTSSLWRMSTRALPTST

SEQ ID NO: 29206 - protein, 53 aa, Artificial Sequence
  Synthetic polypeptide
GCKQSLALVQAWPPTFGRPGAVLSLGLHIPVAKGDQSPQHRRSGGCPREPFPP

SEQ ID NO: 29207 - protein, 45 aa, Artificial Sequence
  Synthetic polypeptide
SRPGHQPLGGLGQCSLWACTSLWQREISHPNIVALEDVHESPSHL

SEQ ID NO: 29208 - protein, 53 aa, Artificial Sequence
  Synthetic polypeptide
VQAVLGSSPGLATNLWEAWGSALSGPAHPCGKGRSVTPTSSLWRMSTRALPTS

SEQ ID NO: 29209 - protein, 6 aa, Artificial Sequence
  Synthetic polypeptide
LPHQPA

SEQ ID NO: 29210 - protein, 6 aa, Artificial Sequence
  Synthetic polypeptide
LPHQPA

SEQ ID NO: 29211 - protein, 6 aa, Artificial Sequence
  Synthetic polypeptide
LPHQPA

SEQ ID NO: 29212 - protein, 6 aa, Artificial Sequence
  Synthetic polypeptide
LPHQPA

SEQ ID NO: 29213 - protein, 6 aa, Artificial Sequence
  Synthetic polypeptide
LPHQPA

SEQ ID NO: 29214 - protein, 6 aa, Artificial Sequence
  Synthetic polypeptide
LPHQPA

SEQ ID NO: 29215 - protein, 6 aa, Artificial Sequence
  Synthetic polypeptide
LPHQPA

SEQ ID NO: 29216 - protein, 6 aa, Artificial Sequence
  Synthetic polypeptide
LPHQPA

SEQ ID NO: 29217 - protein, 150 aa, Artificial Sequence
  Synthetic polypeptide
TSVSSSISWGSDSNFLISLLRRLVTLISQQATLLASNEAFKKQAESASEAAKKYMEENDQLKKGAAVDGGKLDVGNAEVKLEEENRSLKADLQKLKDELASTKQKLEKAENQVLAMRKQSEGLTKEYDRLLEEHAKLQAAVDGPMDKKEE

SEQ ID NO: 29218 - protein, 150 aa, Artificial Sequence; identical to SEQ ID NO: 29217
  Synthetic polypeptide

SEQ ID NO: 29219 - protein, 150 aa, Artificial Sequence; identical to SEQ ID NO: 29217
  Synthetic polypeptide

SEQ ID NO: 29220 - protein, 16 aa, Artificial Sequence
  Synthetic polypeptide
AGAVIVTSSSACLDAW

SEQ ID NO: 29221 - protein, 16 aa, Artificial Sequence
  Synthetic polypeptide
AGAVIVTSSSACLDAW

SEQ ID NO: 29222 - protein, 16 aa, Artificial Sequence
  Synthetic polypeptide
AGAVIVTSSSACLDAW

SEQ ID NO: 29223 - protein, 16 aa, Artificial Sequence
  Synthetic polypeptide
AGAVIVTSSSACLDAW

SEQ ID NO: 29224 - protein, 16 aa, Artificial Sequence
  Synthetic polypeptide
AGAVIVTSSSACLDAW

SEQ ID NO: 29225 - protein, 16 aa, Artificial Sequence
  Synthetic polypeptide
AGAVIVTSSSACLDAW

SEQ ID NO: 29226 - protein, 16 aa, Artificial Sequence
  Synthetic polypeptide
AGAVIVTSSSACLDAW

SEQ ID NO: 29227 - protein, 16 aa, Artificial Sequence
  Synthetic polypeptide
AGAVIVTSSSACLDAW

SEQ ID NO: 29228 - protein, 92 aa, Artificial Sequence
  Synthetic polypeptide
TSVSSSISWGSDSNFLISLLRRLVTLISQQATLLASNEAFKKQAESASEAAKKYMEENDQLKKGAAVDGGKLDVGNAEVKLEEENRSLKADL

SEQ ID NO: 29229 - protein, 91 aa, Artificial Sequence
  Synthetic polypeptide
TSVSSSISWGSDSNFLISLLRRLVTLISQQATLLASNEAFKKQAESASEAAKKYMEENDQLKKGAAVDGGKLDVGNAEVKLEEENRSLKAD

SEQ ID NO: 29230 - protein, 86 aa, Artificial Sequence
  Synthetic polypeptide
TSVSSSISWGSDSNFLISLLRRLVTLISQQATLLASNEAFKKQAESASEAAKKYMEENDQLKKGAAVDGGKLDVGNAEVKLEEENR

SEQ ID NO: 29231 - protein, 82 aa, Artificial Sequence
  Synthetic polypeptide
TSVSSSISWGSDSNFLISLLRRLVTLISQQATLLASNEAFKKQAESASEAAKKYMEENDQLKKGAAVDGGKLDVGNAEVKLE

SEQ ID NO: 29232 - protein, 42 aa, Artificial Sequence
  Synthetic polypeptide
TSVSSSISWGSDSNFLISLLRRLVTLISQQATLLASNEAFKK

SEQ ID NO: 29233 - protein, 221 aa, Artificial Sequence
  Synthetic polypeptide
GWTRWLVPVIPAVWEAEAGGSPERDGQAVLENVSEGGKELPGCLGRQQNPGHTLEAGWFLLRHCIRKGDPELRAHVIDKFLLLPFHSGWDPDHGGLFYFQDADNFCPTQLEWAMKLWWPHSEAMIAFLMGYSDSGDPVLLRLFYQVAEYTFRQFRDPEYGEWFGYLSREGKVALSIKGGPFKGCFHVPRCLAMCEEMLGALLSRPAPAPSPAPTPACRGAE

SEQ ID NO: 29234 - protein, 221 aa, Artificial Sequence; identical to SEQ ID NO: 29233
  Synthetic polypeptide

SEQ ID NO: 29235 - protein, 66 aa, Artificial Sequence
  Synthetic polypeptide
SQQFGRLRRADHLRGMDKLCWRMCQRVARNFLAAWGDSRTQATRWKPAGFCSVIAFGKATPNFEPT

SEQ ID NO: 29236 - protein, 66 aa, Artificial Sequence; identical to SEQ ID NO: 29235
  Synthetic polypeptide

SEQ ID NO: 29237 - protein, 24 aa, Artificial Sequence
  Synthetic polypeptide
FLHFHLRYRVHLTRECQTVGAGWK

SEQ ID NO: 29238 - protein, 24 aa, Artificial Sequence
  Synthetic polypeptide
FLHFHLRYRVHLTRECQTVGAGWK

SEQ ID NO: 29239 - protein, 243 aa, Artificial Sequence
  Synthetic polypeptide
GTGFISLGSARQWAQAGSDGESIGNCPFCQRLFMILWLKGVKFNVTTVDMTRKPEELKDLAPGTNPPFLVYNKELKTDFIKIEEFLEQTLAPPRYPHLSPKYKESFDVGCNLFAKFSAYIKNTQKEANKNFEKSLLKEFKRLDDYLNTPLLDEIDPDSAEEPPVSRRLFLDGDQLTLADCSLLPKLNIIKVAAKKYRDFDIPAEFSGVWRYLHNAYAREEFTHTCPEDKEIENTYANVAKQKS

SEQ ID NO: 29240 - protein, 26 aa, Artificial Sequence
  Synthetic polypeptide
GVPDSGRRLEVMERVLETVPFANAFS

SEQ ID NO: 29241 - protein, 26 aa, Artificial Sequence
  Synthetic polypeptide
GVPDSGRRLEVMERVLETVPFANAFS

SEQ ID NO: 29242 - protein, 129 aa, Artificial Sequence
  Synthetic polypeptide
GTGFISLGSARQWAQAGSDGESIGNCPFCQRLFMILWLKGVKFNVTTVDMTRYPHLSPKYKESFDVGCNLFAKFSAYIKNTQKEANKNFEKSLLKEFKRLDDYLNTPLLDEIDPDSAEEPPVSRRLFLD

SEQ ID NO: 29243 - protein, 25 aa, Artificial Sequence
  Synthetic polypeptide
FLHFHLRLEVMERVLETVPFANAFS

SEQ ID NO: 29244 - protein, 25 aa, Artificial Sequence
  Synthetic polypeptide
FLHFHLRLEVMERVLETVPFANAFS

SEQ ID NO: 29245 - protein, 260 aa, Artificial Sequence
  Synthetic polypeptide
GRSQDGRIGTAPVYSSQDERRRRRVISAFPSEAGSDGESIGNCPFCQRLFMILWLKGVKFNVTTVDMTRKPEELKDLAPGTNPPFLVYNKELKTDFIKIEEFLEQTLAPPRYPHLSPKYKESFDVGCNLFAKFSAYIKNTQKEANKNFEKSLLKEFKRLDDYLNTPLLDEIDPDSAEEPPVSRRLFLDGDQLTLADCSLLPKLNIIKVAAKKYRDFDIPAEFSGVWRYLHNAYAREEFTHTCPEDKEIENTYANVAKQKS

SEQ ID NO: 29246 - protein, 146 aa, Artificial Sequence
  Synthetic polypeptide
GRSQDGRIGTAPVYSSQDERRRRRVISAFPSEAGSDGESIGNCPFCQRLFMILWLKGVKFNVTTVDMTRYPHLSPKYKESFDVGCNLFAKFSAYIKNTQKEANKNFEKSLLKEFKRLDDYLNTPLLDEIDPDSAEEPPVSRRLFLD

SEQ ID NO: 29247 - protein, 25 aa, Artificial Sequence
  Synthetic polypeptide
FLHFHLRLEVMERVLETVPFANAFS

SEQ ID NO: 29248 - protein, 25 aa, Artificial Sequence
  Synthetic polypeptide
FLHFHLRLEVMERVLETVPFANAFS

SEQ ID NO: 29249 - protein, 260 aa, Artificial Sequence
  Synthetic polypeptide
GRSQDGRIGTAPVYSSQRERRRRRVISAFPSEAGSDGESIGNCPFCQRLFMILWLKGVKFNVTTVDMTRKPEELKDLAPGTNPPFLVYNKELKTDFIKIEEFLEQTLAPPRYPHLSPKYKESFDVGCNLFAKFSAYIKNTQKEANKNFEKSLLKEFKRLDDYLNTPLLDEIDPDSAEEPPVSRRLFLDGDQLTLADCSLLPKLNIIKVAAKKYRDFDIPAEFSGVWRYLHNAYAREEFTHTCPEDKEIENTYANVAKQKS

SEQ ID NO: 29250 - protein, 146 aa, Artificial Sequence
  Synthetic polypeptide
GRSQDGRIGTAPVYSSQRERRRRRVISAFPSEAGSDGESIGNCPFCQRLFMILWLKGVKFNVTTVDMTRYPHLSPKYKESFDVGCNLFAKFSAYIKNTQKEANKNFEKSLLKEFKRLDDYLNTPLLDEIDPDSAEEPPVSRRLFLD

SEQ ID NO: 29251 - protein, 40 aa, Artificial Sequence
  Synthetic polypeptide
PAVDTQGPNTLDDLFQELDKNGDGEVSFEEFQVLVKKISQ

SEQ ID NO: 29252 - protein, 26 aa, Artificial Sequence
  Synthetic polypeptide
GVELWSQRVDPNPSVNQLWTLKVQTP

SEQ ID NO: 29253 - protein, 29 aa, Artificial Sequence
  Synthetic polypeptide
VKGLSSGVNVWTPTPLLTSCGHSRSKHPR

SEQ ID NO: 29254 - protein, 38 aa, Artificial Sequence
  Synthetic polypeptide
GRARWLTPVIAAFWEAEAGGSRGQEMETILANMVKSSS

SEQ ID NO: 29255 - protein, 38 aa, Artificial Sequence; identical to SEQ ID NO: 29254
  Synthetic polypeptide

SEQ ID NO: 29256 - protein, 38 aa, Artificial Sequence; identical to SEQ ID NO: 29254
  Synthetic polypeptide

SEQ ID NO: 29257 - protein, 24 aa, Artificial Sequence
  Synthetic polypeptide
SQHFGRLKQVDHEVRRWRPSWPTW

SEQ ID NO: 29258 - protein, 24 aa, Artificial Sequence
  Synthetic polypeptide
SQHFGRLKQVDHEVRRWRPSWPTW

SEQ ID NO: 29259 - protein, 24 aa, Artificial Sequence
  Synthetic polypeptide
SQHFGRLKQVDHEVRRWRPSWPTW

SEQ ID NO: 29260 - protein, 547 aa, Artificial Sequence
  Synthetic polypeptide
SRWITRSGDGDHPGQHGEVFVLNDGGEVDLDLGNYERFLDINLYKDNNITTGKIYQHVINKERRGDYLGKTVQVVPHITDAVQEWVMNQAKVPVDGNKEEPQICVIELGGTIGDIEGMPFVEAFRQFQFKAKRENFCNIHVSLVPQLSATGEQKTKPTQNSVRALRGLGLSPDLIVCRSSTPIEMAVKEKISMFCHVNPEQVICIHDVSSTYRVPVLLEEQSIVKYFKERLHLPIGDSASNLLFKWRNMADRYERLQKICSIALVGKYTKLRDCYASVFKALEHSALAINHKLNLMYIDSIDLEKITETEDPVKFHEAWQKLCKADGILVPGGFGIRGTLGKLQAISWARTKKIPFLGVCLGMQLAVIEFARNCLNLKDADSTEFRPNAPVPLVIDMPEHNPGNLGGTMRLGIRRTVFKTENSILRKLYGDVPFIEERHRHRFEVNPNLIKQFEQNDLSFVGQDVDGDRMEIIELANHPYFVGVQFHPEFSSRPMKPSPPYLGLLLAATGNLNAYLQQGCKLSSSDRYSDASDDSFSEPRIAELEIS

SEQ ID NO: 29261 - protein, 547 aa, Artificial Sequence; identical to SEQ ID NO: 29260
  Synthetic polypeptide

SEQ ID NO: 29262 - protein, 547 aa, Artificial Sequence; identical to SEQ ID NO: 29260
  Synthetic polypeptide

SEQ ID NO: 29263 - protein, 437 aa, Artificial Sequence
  Synthetic polypeptide
ESPYEARQPLVQPEGSSSGGPGTKPLRHQASLIRSFSVERELQDNSSYPDEPWRITEEQREYYVNQFRSLQPDPSSFISGSVAKNFFTKSKLSIPELSYIWELSDADCDGALTLPEFCAAFHLIVARKNGYPLPEGLPPTLQPEYLQAAFPKPKWDCQLFDSYSESLPANQQPRDLNRMEKTSVKDMADLPVPNQDVTSDDKQALKSTINEALPKDVSEDPATPKDSNSLKARPRSRSYSSTSIEEAMKRGEDPPTPPPRPQKTHSRASSLDLNKVFQPSVPATKSGLLPPPPALPPRPCPSQSEQVSEAELLPQLSRAPSQAAESSPAKKDVLYSQPPSKPIRRKFRPENQATENQEPSTAASGPASAATMKPHPTVQKQSSKQKKAIQTAIRKNKEANAVLARLNSELQQQLKEVHQERIALENQLEQLRPVTVL

SEQ ID NO: 29264 - protein, 437 aa, Artificial Sequence; identical to SEQ ID NO: 29263
  Synthetic polypeptide

SEQ ID NO: 29265 - protein, 62 aa, Artificial Sequence
  Synthetic polypeptide
RGIRRLSENHLMKLGSPLSSPRDPHQGAQEPSPFGIRLPLSGPFQWRGNYRITAVTPTNPGG

SEQ ID NO: 29266 - protein, 62 aa, Artificial Sequence; identical to SEQ ID NO: 29265
  Synthetic polypeptide

SEQ ID NO: 29267 - protein, 62 aa, Artificial Sequence; identical to SEQ ID NO: 29265
  Synthetic polypeptide

SEQ ID NO: 29268 - protein, 5 aa, Artificial Sequence
  Synthetic polypeptide
VRITL

SEQ ID NO: 29269 - protein, 5 aa, Artificial Sequence
  Synthetic polypeptide
VRITL

SEQ ID NO: 29270 - protein, 5 aa, Artificial Sequence
  Synthetic polypeptide
VRITL

SEQ ID NO: 29271 - protein, 376 aa, Artificial Sequence
  Synthetic polypeptide
ESPYEARQPLVQPEGSSSGGPGTKPLRHQASLIRSFSVERELQDNSSYPDEPWRITEEQREYYVNQFRSLQPDPSSFISGSVAKNFFTKSKLSIPELSYIWELSDADCDGALTLPEFCAAFHLIVARKNGYPLPEGLPPTLQPEYLQAAFPKPKWDCQLFDSYSESLPANQQPRDLNRMEKTSVKDMADLPVPNQDVTSDDKQALKSTINEALPKDVSEDPATKSGLLPPPPALPPRPCPSQSEQVSEAELLPQLSRAPSQAAESSPAKKDVLYSQPPSKPIRRKFRPENQATENQEPSTAASGPASAATMKPHPTVQKQSSKQKKAIQTAIRKNKEANAVLARLNSELQQQLKEVHQERIALENQLEQLRPVTVL

SEQ ID NO: 29272 - protein, 39 aa, Artificial Sequence
  Synthetic polypeptide
GLPSHAELLLGRSYLQLQQLQTHQKQKWTAGQRARITAK

SEQ ID NO: 29273 - protein, 39 aa, Artificial Sequence; identical to SEQ ID NO: 29272
  Synthetic polypeptide

SEQ ID NO: 29274 - protein, 39 aa, Artificial Sequence; identical to SEQ ID NO: 29272
  Synthetic polypeptide

SEQ ID NO: 29275 - protein, 39 aa, Artificial Sequence; identical to SEQ ID NO: 29272
  Synthetic polypeptide

SEQ ID NO: 29276 - protein, 39 aa, Artificial Sequence; identical to SEQ ID NO: 29272
  Synthetic polypeptide

SEQ ID NO: 29277 - protein, 85 aa, Artificial Sequence
  Synthetic polypeptide
VLMRSDGFIRGFSPRHSFFSFLWPCEEGHICFPFCHDCKFAEASPAMLNYYWEEVTCNYSNSRLIKNRNGQQDKEQGLLQSNISI

SEQ ID NO: 29278 - protein, 85 aa, Artificial Sequence; identical to SEQ ID NO: 29277
  Synthetic polypeptide

SEQ ID NO: 29279 - protein, 85 aa, Artificial Sequence; identical to SEQ ID NO: 29277
  Synthetic polypeptide

SEQ ID NO: 29280 - protein, 85 aa, Artificial Sequence; identical to SEQ ID NO: 29277
  Synthetic polypeptide

SEQ ID NO: 29281 - protein, 85 aa, Artificial Sequence; identical to SEQ ID NO: 29277
  Synthetic polypeptide

SEQ ID NO: 29282 - protein, 424 aa, Artificial Sequence
  Synthetic polypeptide
TTIGKKLPATTATPDSSKTEMDSRTKSKDYCKVIFPYEAQNDDELTIKEGDIVTLINKDCIDVGWWEGELNGRRGVFPDNFVKLLPPDFEKEGNRPKKPPPPSAPVIKQGAGTTERKHEIKKIPPERPEMLPNRTEEKERPEREPKLDLQKPSVPAIPPKKPRPPKTNSLSRPGALPPRRPERPVGPLTHTRGDSPKIDLAGSSLSGILDKDLSDRSNDIDLEGFDSVVSSTEKLSHPTTSRPKATGRRPPSQSLTSSSLSSPDIFDSPSPEEDKEEHISLAHRGVDASKKTSKTVTISQVSDNKASLPPKPGTMAAGGGGPAPLSSAAPSPLSSSLGTAGHRANSPSLFGTEGKPKMEPAASSQAAVEELRTQVRELRSIIETMKDQQKREIKQLLSELDEEKKIRLRLQMEVNDIKKALQSK

SEQ ID NO: 29283 - protein, 424 aa, Artificial Sequence; identical to SEQ ID NO: 29282
  Synthetic polypeptide

SEQ ID NO: 29284 - protein, 424 aa, Artificial Sequence; identical to SEQ ID NO: 29282
  Synthetic polypeptide

SEQ ID NO: 29285 - protein, 424 aa, Artificial Sequence; identical to SEQ ID NO: 29282
  Synthetic polypeptide

SEQ ID NO: 29286 - protein, 268 aa, Artificial Sequence
  Synthetic polypeptide
TTIGKKLPATTATPDSSKTEMDSRTKSKDYCKVIFPYEAQNDDELTIKEGDIVTLINKDCIDVGWWEGELNGRRGVFPDNFVKLLPPDFEKEGNRPKKPPPPSAPVIKQGAGTTERKHEIKKIPPERPEMLPNRTEEKERPEREPKLDLQKPSVPAIPPKKPRPPKTNSLSRPGALPPRRPERPVGPLTHTRYCCALTSGAGVGWLWKEHRRGTDCHRPWEEGRGEGGAQASLLHPPAKLSEDTGHFCPCSCTQAGVSVRLRGAVWVS

SEQ ID NO: 29287 - protein, 27 aa, Artificial Sequence
  Synthetic polypeptide
GLPSHAELLLGRSYLQLQQLQTHQKQK

SEQ ID NO: 29288 - protein, 69 aa, Artificial Sequence
  Synthetic polypeptide
VLMRSDGFIRGFSPRHSFFSFLWPCEEGHICFPFCHDCKFAEASPAMLNYYWEEVTCNYSNSRLIKNRN

SEQ ID NO: 29289 - protein, 20 aa, Artificial Sequence
  Synthetic polypeptide
TTIGKKLPATTATPDSSKTE

SEQ ID NO: 29290 - protein, 73 aa, Artificial Sequence
  Synthetic polypeptide
VLMRSDGFIRGFSPRHSFFSFLWPCEEGHICFPFCHDYYWEEVTCNYSNSRLIKNRNGQQDKEQGLLQSNISI

SEQ ID NO: 29291 - protein, 73 aa, Artificial Sequence; identical to SEQ ID NO: 29290
  Synthetic polypeptide

SEQ ID NO: 29292 - protein, 73 aa, Artificial Sequence; identical to SEQ ID NO: 29290
  Synthetic polypeptide

SEQ ID NO: 29293 - protein, 73 aa, Artificial Sequence; identical to SEQ ID NO: 29290
  Synthetic polypeptide

SEQ ID NO: 29294 - protein, 73 aa, Artificial Sequence; identical to SEQ ID NO: 29290
  Synthetic polypeptide

SEQ ID NO: 29295 - protein, 457 aa, Artificial Sequence
  Synthetic polypeptide
DLMVLLGAFPHVTLSSPSCGHVKKDIFASLSAMITIGKKLPATTATPDSSKTEMDSRTKSKDYCKVIFPYEAQNDDELTIKEGDIVTLINKDCIDVGWWEGELNGRRGVFPDNFVKLLPPDFEKEGNRPKKPPPPSAPVIKQGAGTTERKHEIKKIPPERPEMLPNRTEEKERPEREPKLDLQKPSVPAIPPKKPRPPKTNSLSRPGALPPRRPERPVGPLTHTRGDSPKIDLAGSSLSGILDKDLSDRSNDIDLEGFDSVVSSTEKLSHPTTSRPKATGRRPPSQSLTSSSLSSPDIFDSPSPEEDKEEHISLAHRGVDASKKTSKTVTISQVSDNKASLPPKPGTMAAGGGGPAPLSSAAPSPLSSSLGTAGHRANSPSLFGTEGKPKMEPAASSQAAVEELRTQVRELRSIIETMKDQQKREIKQLLSELDEEKKIRLRLQMEVNDIKKALQSK

SEQ ID NO: 29296 - protein, 457 aa, Artificial Sequence; identical to SEQ ID NO: 29295
  Synthetic polypeptide

SEQ ID NO: 29297 - protein, 457 aa, Artificial Sequence; identical to SEQ ID NO: 29295
  Synthetic polypeptide

SEQ ID NO: 29298 - protein, 457 aa, Artificial Sequence; identical to SEQ ID NO: 29295
  Synthetic polypeptide

SEQ ID NO: 29299 - protein, 301 aa, Artificial Sequence
  Synthetic polypeptide
DLMVLLGAFPHVTLSSPSCGHVKKDIFASLSAMITIGKKLPATTATPDSSKTEMDSRTKSKDYCKVIFPYEAQNDDELTIKEGDIVTLINKDCIDVGWWEGELNGRRGVFPDNFVKLLPPDFEKEGNRPKKPPPPSAPVIKQGAGTTERKHEIKKIPPERPEMLPNRTEEKERPEREPKLDLQKPSVPAIPPKKPRPPKTNSLSRPGALPPRRPERPVGPLTHTRYCCALTSGAGVGWLWKEHRRGTDCHRPWEEGRGEGGAQASLLHPPAKLSEDTGHFCPCSCTQAGVSVRLRGAVWVS

SEQ ID NO: 29300 - protein, 57 aa, Artificial Sequence
  Synthetic polypeptide
VLMRSDGFIRGFSPRHSFFSFLWPCEEGHICFPFCHDYYWEEVTCNYSNSRLIKNRN

SEQ ID NO: 29301 - protein, 53 aa, Artificial Sequence
  Synthetic polypeptide
DLMVLLGAFPHVTLSSPSCGHVKKDIFASLSAMITIGKKLPATTATPDSSKTE

SEQ ID NO: 29302 - protein, 42 aa, Artificial Sequence
  Synthetic polypeptide
ISDFWSPEVPATHPTQPTPRASWPLSCSPTTSSGCWRLREAT

SEQ ID NO: 29303 - protein, 42 aa, Artificial Sequence; identical to SEQ ID NO: 29302
  Synthetic polypeptide

SEQ ID NO: 29304 - protein, 72 aa, Artificial Sequence
  Synthetic polypeptide
PRGQGLPEPPEAGKGRKGSCPRRPSRESTTLSTPEFQTSGLQKCLLLTPRSLRPEQAGPCPVHLPPPAAAGG

SEQ ID NO: 29305 - protein, 72 aa, Artificial Sequence; identical to SEQ ID NO: 29304
  Synthetic polypeptide

SEQ ID NO: 29306 - protein, 176 aa, Artificial Sequence
  Synthetic polypeptide
SDHGVRDSPSPQKLGKAGRVPALEDRPERARPCPLLNFRLLVSRSACYSPHAAYAQSKLALVLFTYHLQRLLAAEGSHVTANVVDPGVVNTDVYKHVFWATRLAKKLLGWLLFKTPDEGAWTSIYAAVTPELEGVGGHYLYNEKETKSLHVTYNQKLQQQLWSKSCEMTGVLDVTL

SEQ ID NO: 29307 - protein, 101 aa, Artificial Sequence
  Synthetic polypeptide
SDHGVRDSPSPQKLGKAGRVPALEDRPERARPCPLLNFRLLVSRSACYSPHAAYAQSKLALVLFTYHLQRLLAAEGSHVTANVVDPGVVNTDVYKHVFWAT

SEQ ID NO: 29308 - protein, 28 aa, Artificial Sequence
  Synthetic polypeptide
MGVGNACLGPTLHGLNHSWWRGLMVRPF

SEQ ID NO: 29309 - protein, 28 aa, Artificial Sequence
  Synthetic polypeptide
MGVGNACLGPTLHGLNHSWWRGLMVRPF

SEQ ID NO: 29310 - protein, 28 aa, Artificial Sequence
  Synthetic polypeptide
MGVGNACLGPTLHGLNHSWWRGLMVRPF

SEQ ID NO: 29311 - protein, 7 aa, Artificial Sequence
  Synthetic polypeptide
ITVGGGG

SEQ ID NO: 29312 - protein, 7 aa, Artificial Sequence
  Synthetic polypeptide
ITVGGGG

SEQ ID NO: 29313 - protein, 7 aa, Artificial Sequence
  Synthetic polypeptide
ITVGGGG

SEQ ID NO: 29314 - protein, 371 aa, Artificial Sequence
  Synthetic polypeptide
GSGECMLGPYSTRTESQLVEGADGETILKGLQSIFQEQGMAESVHTWQDHGYLATYTNKNGSFANLRIYPHGLVLLDLQSYDGDAQGKEEIDSILNKVEERMKELSQDSTGRVKRLPPIVRGGAIDRYWPTADGRLVEYDIDEVVYDEDSPYQNIKILHSKQFGNILILSGDVNLAESDLAYTRAIMGSGKEDYTGKDVLILGGGDGGILCEIVKLKPKMVTMVEIDQMVIDGCKKYMRKTCGDVLDNLKGDCYQVLIEDCIPVLKRYAKEGREFDYVINDLTAVPISTSPEEDSTWEFLRLILDLSMKVLKQDGKYFTQGNCVNLTEALSLYEEQLGRLYCPVEFSKEIVCVPSYLELWVFYTVWKKAKP

SEQ ID NO: 29315 - protein, 318 aa, Artificial Sequence
  Synthetic polypeptide
GSGECMLGPYSTRTESQLVEGADGETILKGLQSIFQEQGMAESVHTWQDHGYLATYTNKNGRLPPIVRGGAIDRYWPTADGRLVEYDIDEVVYDEDSPYQNIKILHSKQFGNILILSGDVNLAESDLAYTRAIMGSGKEDYTGKDVLILGGGDGGILCEIVKLKPKMVTMVEIDQMVIDGCKKYMRKTCGDVLDNLKGDCYQVLIEDCIPVLKRYAKEGREFDYVINDLTAVPISTSPEEDSTWEFLRLILDLSMKVLKQDGKYFTQGNCVNLTEALSLYEEQLGRLYCPVEFSKEIVCVPSYLELWVFYTVWKKAKP

SEQ ID NO: 29316 - protein, 224 aa, Artificial Sequence
  Synthetic polypeptide
GSGECMLGPYSTRTESQLVEGADGETILKGLQSIFQEQGMAESVHTWQDHGYLATYTNKNGSFANLRIYPHGLVLLDLQSYDGDAQGKEEIDSILNKVEERMKELSQDSTGRVKRLPPIVRGGAIDRYWPTADGRLVEYDIDEVVYDEDSPYQNIKILHSKQFGNILILSGDVNLAESDLAYTRAIMGSGKEDYTGKDVLILGGGDGGILCEIVKLKPKMVTMV

SEQ ID NO: 29317 - protein, 271 aa, Artificial Sequence
  Synthetic polypeptide
CFINGSSPTGAILPAAVEDMVFVFRRDCEASPTPWNLEFLYCDLASMTSIRQFVQKFKMKKIPLHVLINNAGVMMVPQRKTRDGFEEHFGLNYLGHFLLTNLLLDTLKESGSPGHSARVVTVSSATHYVAELNMDDLQSSACYSPHAAYAQSKLALVLFTYHLQRLLAAEGSHVTANVVDPGVVNTDVYKHVFWATRLAKKLLGWLLFKTPDEGAWTSIYAAVTPELEGVGGHYLYNEKETKSLHVTYNQKLQQQLWSKSCEMTGVLDVTL

SEQ ID NO: 29318 - protein, 43 aa, Artificial Sequence
  Synthetic polypeptide
MEVPLQEPFCLPPWKIWFSSSVVIVRPPQPRGTWNFYTVTWLP

SEQ ID NO: 29319 - protein, 43 aa, Artificial Sequence; identical to SEQ ID NO: 29318
  Synthetic polypeptide

SEQ ID NO: 29320 - protein, 43 aa, Artificial Sequence; identical to SEQ ID NO: 29318
  Synthetic polypeptide

SEQ ID NO: 29321 - protein, 13 aa, Artificial Sequence
  Synthetic polypeptide
GLPNPVELGIFIL

SEQ ID NO: 29322 - protein, 13 aa, Artificial Sequence
  Synthetic polypeptide
GLPNPVELGIFIL

SEQ ID NO: 29323 - protein, 13 aa, Artificial Sequence
  Synthetic polypeptide
GLPNPVELGIFIL

SEQ ID NO: 29324 - protein, 196 aa, Artificial Sequence
  Synthetic polypeptide
CFINGSSPTGAILPAAVEDMVFVFRRDCEASPTPWNLEFLYCDLASMTSIRQFVQKFKMKKIPLHVLINNAGVMMVPQRKTRDGFEEHFGLNYLGHFLLTNLLLDTLKESGSPGHSARVVTVSSATHYVAELNMDDLQSSACYSPHAAYAQSKLALVLFTYHLQRLLAAEGSHVTANVVDPGVVNTDVYKHVFWAT

SEQ ID NO: 29325 - protein, 129 aa, Artificial Sequence
  Synthetic polypeptide
CFINGSSPTGAILPAAVEDMVFVFRRDCEASPTPWNLEFLYCDLASMTSIRQFVQKFKMKKIPLHVLINNAGVMMVPQRKTRDGFEEHFGLNYLGHFLLTNLLLDTLKESGSPGHSARVVTVSSATHYV

SEQ ID NO: 29326 - protein, 3703 aa, Artificial Sequence
  Synthetic polypeptide
LIEPFKARWGIWPHTLSTQSPCTRFLTCDEREDVQKKTFTKWVNAQFSKFGKQHIENLFSDLQDGRRLLDLLEGLTGQKLPKEKGSTRVHALNNVNKALRVLQNNNVDLVNIGSTDIVDGNHKLTLGLIWNIILHWQVKNVMKNIMAGLQQTNSEKILLSWVRQSTRNYPQVNVINFTTSWSDGLALNALIHSHRPDLFDWNSVVCQQSATQRLEHAFNIARYQLGIEKLLDPEDVDTTYPDKKSILMYITSLFQVLPQQVSIEAIQEVEMLPRPPKVTKEEHFQLHHQMHYSQQITVSLAQGYERTSSPKPRFKSYAYTQAAYVTTSDPTRSPFPSQHLEAPEDKSFGSSLMESEVNLDRYQTALEEVLSWLLSAEDTLQAQGEISNDVEVVKDQFHTHEGYMMDLTAHQGRVGNILQLGSKLIGTGKLSEDEETEVQEQMNLLNSRWECLRVASMEKQSNLHRVLMDLQNQKLKELNDWLTKTEERTRKMEEEPLGPDLEDLKRQVQQHKVLQEDLEQEQVRVNSLTHMVVVVDESSGDHATAALEEQLKVLGDRWANICRWTEDRWVLLQDILLKWQRLTEEQCLFSAWLSEKEDAVNKIHTTGFKDQNEMLSSLQKLAVLKADLEKKKQSMGKLYSLKQDLLSTLKNKSVTQKTEAWLDNFARCWDNLVQKLEKSTAQISQAVTTTQPSLTQTTVMETVTTVTTREQILVKHAQEELPPPPPQKKRQITVDSEIRKRLDVDITELHSWITRSEAVLQSPEFAIFRKEGNFSDLKEKVNAIEREKAEKFRKLQDASRSAQALVEQMVNEGVNADSIKQASEQLNSRWIEFCQLLSERLNWLEYQNNIIAFYNQLQQLEQMTTTAENWLKIQPTTPSEPTAIKSQLKICKDEVNRLSDLQPQIERLKIQSIALKEKGQGPMFLDADFVAFTNHFKQVFSDVQAREKELQTIFDTLPPMRYQETMSAIRTWVQQSETKLSIPQLSVTDYEIMEQRLGELQALQSSLQEQQSGLYYLSTTVKEMSKKAPSEISRKYQSEFEEIEGRWKKLSSQLVEHCQKLEEQMNKLRKIQNHIQTLKKWMAEVDVFLKEEWPALGDSEILKKQLKQCRLLVSDIQTIQPSLNSVNEGGQKIKNEAEPEFASRLETELKELNTQWDHMCQQVYARKEALKGGLEKTVSLQKDLSEMHEWMTQAEEEYLERDFEYKTPDELQKAVEEMKRAKEEAQQKEAKVKLLTESVNSVIAQAPPVAQEALKKELETLTTNYQWLCTRLNGKCKTLEEVWACWHELLSYLEKANKWLNEVEFKLKTTENIPGGAEEISEVLDSLENLMRHSEDNPNQIRILAQTLTDGGVMDELINEELETFNSRWRELHEEAVRRQKLLEQSIQSAQETEKSLHLIQESLTFIDKQLAAYIADKVDAAQMPQEAQKIQSDLTSHEISLEEMKKHNQGKEAAQRVLSQIDVAQKKLQDVSMKFRLFQKPANFEQRLQESKMILDEVKMHLPALETKSVEQEVVQSQLNHCVNLYKSLSEVKSEVEMVIKTGRQIVQKKQTENPKELDERVTALKLHYNELGAKVTERKQQLEKCLKLSRKMRKEMNVLTEWLAATDMELTKRSAVEGMPSNLDSEVAWGKATQKEIEKQKVHLKSITEVGEALKTVLGKKETLVEDKLSLLNSNWIAVTSRAEEWLNLLLEYQKHMETFDQNVDHITKWIIQADTLLDESEKKKPQQKEDVLKRLKAELNDIRPKVDSTRDQAANLMANRGDHCRKLVEPQISELNHRFAAISHRIKTGKASIPLKELEQFNSDIQKLLEPLEAEIQQGVNLKEEDFNKDMNEDNEGTVKELLQRGDNLQQRITDERKREEIKIKQQLLQTKHNALKDLRSQRRKKALEISHQWYQYKRQADDLLKCLDDIEKKLASLPEPRDERKIKEIDRELQKKKEELNAVRRQAEGLSEDGAAMAVEPTQIQLSKRWREIESKFAQFRRLNFAQIHTVREETMMVMTEDMPLEISYVPSTYLTEITHVSQALLEVEQLLNAPDLCAKDFEDLFKQEESLKNIKDSLQQSSGRIDIIHSKKTAALQSATPVERVKLQEALSQLDFQWEKVNKMYKDRQGRFDRSVEKWRRFHYDIKIFNQWLTEAEQFLRKTQIPENWEHAKYKWYLKELQDGIGQRQTVVRTLNATGEEIIQQSSKTDASILQEKLGSLNLRWQEVCKQLSDRKKRLEEQKNILSEFQRDLNEFVLWLEEADNIASIPLEPGKEQQLKEKLEQVKLLVEELPLRQGILKQLNETGGPVLVSAPISPEEQDKLENKLKQTNLQWIKVSRALPEKQGEIEAQIKDLGQLEKKLEDLEEQLNHLLLWLSPIRNQLEIYNQPNQEGPFDVKETEIAVQAKQPDVEEILSKGQHLYKEKPATQPVKRKLEDLSSEWKAVNRLLQELRAKQPDLAPGLTTIGASPTQTVTLVTQPVVTKETAISKLEMPSSLMLEVPALADFNRAWTELTDWLSLLDQVIKSQRVMVGDLEDINEMIIKQKATMQDLEQRRPQLEELITAAQNLKNKTSNQEARTIITDRIERIQNQWDEVQEHLQNRRQQLNEMLKDSTQWLEAKEEAEQVLGQARAKLESWKEGPYTVDAIQKKITETKQLAKDLRQWQTNVDVANDLALKLLRDYSADDTRKVHMITENINASWRSIHKRVSEREAALEETHRLLQQFPLDLEKFLAWLTEAETTANVLQDATRKERLLEDSKGVKELMKQWQDLQGEIEAHTDVYHNLDENSQKILRSLEGSDDAVLLQRRLDNMNFKWSELRKKSLNIRSHLEASSDQWKRLHLSLQELLVWLQLKDDELSRQAPIGGDFPAVQKQNDVHRAFKRELKTKEPVIMSTLETVRIFLTEQPLEGLEKLYQEPRELPPEERAQNVTRLLRKQAEEVNTEWEKLNLHSADWQRKIDETLERLRELQEATDELDLKLRQAEVIKGSWQPVGDLLIDSLQDHLEKVKALRGEIAPLKENVSHVNDLARQLTTLGIQLSPYNLSTLEDLNTRWKLLQVAVEDRVRQLHEAHRDFGPASQHFLSTSVQGPWERAISPNKVPYYINHETQTTCWDHPKMTELYQSLADLNNVRFSAYRTAMKLRRLQKALCLDLLSLSAACDALDQHNLKQNDQPMDILQIINCLTTIYDRLEQEHNNLVNVPLCVDMCLNWLLNVYDTGRTGRIRVLSFKTGIISLCKAHLEDKYRYLFKQVASSTGFCDQRRLGLLLHDSIQIPRQLGEVASFGGSNIEPSVRSCFQFANNKPEIEAALFLDWMRLEPQSMVWLPVLHRVAAAETAKHQAKCNICKECPIIGFRYRSLKHFNYDICQSCFFSGRVAKGHKMHYPMVEYCTPTTSGEDVRDFAKVLKNKFRTKRYFAKHPRMGYLPVQTVLEGDNMETPVTLINFWPVDSAPASSPQLSHDDTHSRIEHYASRLAEMENSNGSYLNDSISPNESIDDEHLLIQHYCQSLNQDSPLSQPRSPAQILISLESEERGELERILADLEEENRNLQAEYDRLKQQHEHKGLSPLPSPPEMMPTSPQSPRDAELIAEAKLLRQHKGRLEARMQILEDHNKQLESQLHRLRQLLEQPQAEAKVNGTTVSSPSTSLQRSDSSQPMLLRVVGSQTSDSMGEEDLLSPPQDTSTGLEEVMEQLNNSFPSSRGRNTPGKPMREDTM

SEQ ID NO: 29327 - protein, 3703 aa, Artificial Sequence; identical to SEQ ID NO: 29326
  Synthetic polypeptide

SEQ ID NO: 29328 - protein, 16 aa, Artificial Sequence
  Synthetic polypeptide
PVMKEKMFKRKHSQNG

SEQ ID NO: 29329 - protein, 16 aa, Artificial Sequence
  Synthetic polypeptide
PVMKEKMFKRKHSQNG

SEQ ID NO: 29330 - protein, 16 aa, Artificial Sequence
  Synthetic polypeptide
PVMKEKMFKRKHSQNG

SEQ ID NO: 29331 - protein, 16 aa, Artificial Sequence
  Synthetic polypeptide
PVMKEKMFKRKHSQNG

SEQ ID NO: 29332 - protein, 16 aa, Artificial Sequence
  Synthetic polypeptide
PVMKEKMFKRKHSQNG

SEQ ID NO: 29333 - protein, 119 aa, Artificial Sequence
  Synthetic polypeptide
LIEPFKARWGIWPHTLSTQSPCTRFLTCDEREDVQKKTFTKWVNAQFSKATQKEIEKQKVHLKSITEVGEALKTVLGKKETLVEDKLSLLNSNWIAVTSRAEEWLNLLLEYQKHMETFD

SEQ ID NO: 29334 - protein, 59 aa, Artificial Sequence
  Synthetic polypeptide
LIEPFKARWGIWPHTLSTQSPCTRFLTCDEREDVQKKTFTKWVNAQFSKEYQKHMETFD

SEQ ID NO: 29335 - protein, 798 aa, Artificial Sequence
  Synthetic polypeptide
LIEPFKARWGIWPHTLSTQSPCTRFLTCDEREDVQKKTFTKWVNAQFSKFGKQHIENLFSDLQDGRRLLDLLEGLTGQKLPKEKGSTRVHALNNVNKALRVLQNNNVDLVNIGSTDIVDGNHKLTLGLIWNIILHWQVKNVMKNIMAGLQQTNSEKILLSWVRQSTRNYPQVNVINFTTSWSDGLALNALIHSHRPDLFDWNSVVCQQSATQRLEHAFNIARYQLGIEKLLDPEDVDTTYPDKKSILMYITSLFQVLPQQVSIEAIQEVEMLPRPPKVTKEEHFQLHHQMHYSQQITVSLAQGYERTSSPKPRFKSYAYTQAAYVTTSDPTRSPFPSQHLEAPEDKSFGSSLMESEVNLDRYQTALEEVLSWLLSAEDTLQAQGEISNDVEVVKDQFHTHEGYMMDLTAHQGRVGNILQLGSKLIGTGKLSEDEETEVQEQMNLLNSRWECLRVASMEKQSNLHRVLMDLQNQKLKELNDWLTKTEERTRKMEEEPLGPDLEDLKRQVQQHKVLQEDLEQEQVRVNSLTHMVVVVDESSGDHATAALEEQLKVLGDRWANICRWTEDRWVLLQDILLKWQRLTEEQCLFSAWLSEKEDAVNKIHTTGFKDQNEMLSSLQKLAVLKADLEKKKQSMGKLYSLKQDLLSTLKNKSVTQKTEAWLDNFARCWDNLVQKLEKSTAQISQAVTTTQPSLTQTTVMETVTTVTTREQILVKHAQEELPPPPPQKKRQITVDSEIRKRLDVDITELHSWITRSEAVLQSPEFAIFRKEGNFSDLKEKVNVGYALIFISVLILCCL

SEQ ID NO: 29336 - protein, 3713 aa, Artificial Sequence
  Synthetic polypeptide
SGLNPTAIAQASRVVRRHSVLLEAAEKGNPETWHPSNKDEREDVQKKTFTKWVNAQFSKFGKQHIENLFSDLQDGRRLLDLLEGLTGQKLPKEKGSTRVHALNNVNKALRVLQNNNVDLVNIGSTDIVDGNHKLTLGLIWNIILHWQVKNVMKNIMAGLQQTNSEKILLSWVRQSTRNYPQVNVINFTTSWSDGLALNALIHSHRPDLFDWNSVVCQQSATQRLEHAFNIARYQLGIEKLLDPEDVDTTYPDKKSILMYITSLFQVLPQQVSIEAIQEVEMLPRPPKVTKEEHFQLHHQMHYSQQITVSLAQGYERTSSPKPRFKSYAYTQAAYVTTSDPTRSPFPSQHLEAPEDKSFGSSLMESEVNLDRYQTALEEVLSWLLSAEDTLQAQGEISNDVEVVKDQFHTHEGYMMDLTAHQGRVGNILQLGSKLIGTGKLSEDEETEVQEQMNLLNSRWECLRVASMEKQSNLHRVLMDLQNQKLKELNDWLTKTEERTRKMEEEPLGPDLEDLKRQVQQHKVLQEDLEQEQVRVNSLTHMVVVVDESSGDHATAALEEQLKVLGDRWANICRWTEDRWVLLQDILLKWQRLTEEQCLFSAWLSEKEDAVNKIHTTGFKDQNEMLSSLQKLAVLKADLEKKKQSMGKLYSLKQDLLSTLKNKSVTQKTEAWLDNFARCWDNLVQKLEKSTAQISQAVTTTQPSLTQTTVMETVTTVTTREQILVKHAQEELPPPPPQKKRQITVDSEIRKRLDVDITELHSWITRSEAVLQSPEFAIFRKEGNFSDLKEKVNAIEREKAEKFRKLQDASRSAQALVEQMVNEGVNADSIKQASEQLNSRWIEFCQLLSERLNWLEYQNNIIAFYNQLQQLEQMTTTAENWLKIQPTTPSEPTAIKSQLKICKDEVNRLSDLQPQIERLKIQSIALKEKGQGPMFLDADFVAFTNHFKQVFSDVQAREKELQTIFDTLPPMRYQETMSAIRTWVQQSETKLSIPQLSVTDYEIMEQRLGELQALQSSLQEQQSGLYYLSTTVKEMSKKAPSEISRKYQSEFEEIEGRWKKLSSQLVEHCQKLEEQMNKLRKIQNHIQTLKKWMAEVDVFLKEEWPALGDSEILKKQLKQCRLLVSDIQTIQPSLNSVNEGGQKIKNEAEPEFASRLETELKELNTQWDHMCQQVYARKEALKGGLEKTVSLQKDLSEMHEWMTQAEEEYLERDFEYKTPDELQKAVEEMKRAKEEAQQKEAKVKLLTESVNSVIAQAPPVAQEALKKELETLTTNYQWLCTRLNGKCKTLEEVWACWHELLSYLEKANKWLNEVEFKLKTTENIPGGAEEISEVLDSLENLMRHSEDNPNQIRILAQTLTDGGVMDELINEELETFNSRWRELHEEAVRRQKLLEQSIQSAQETEKSLHLIQESLTFIDKQLAAYIADKVDAAQMPQEAQKIQSDLTSHEISLEEMKKHNQGKEAAQRVLSQIDVAQKKLQDVSMKFRLFQKPANFEQRLQESKMILDEVKMHLPALETKSVEQEVVQSQLNHCVNLYKSLSEVKSEVEMVIKTGRQIVQKKQTENPKELDERVTALKLHYNELGAKVTERKQQLEKCLKLSRKMRKEMNVLTEWLAATDMELTKRSAVEGMPSNLDSEVAWGKATQKEIEKQKVHLKSITEVGEALKTVLGKKETLVEDKLSLLNSNWIAVTSRAEEWLNLLLEYQKHMETFDQNVDHITKWIIQADTLLDESEKKKPQQKEDVLKRLKAELNDIRPKVDSTRDQAANLMANRGDHCRKLVEPQISELNHRFAAISHRIKTGKASIPLKELEQFNSDIQKLLEPLEAEIQQGVNLKEEDFNKDMNEDNEGTVKELLQRGDNLQQRITDERKREEIKIKQQLLQTKHNALKDLRSQRRKKALEISHQWYQYKRQADDLLKCLDDIEKKLASLPEPRDERKIKEIDRELQKKKEELNAVRRQAEGLSEDGAAMAVEPTQIQLSKRWREIESKFAQFRRLNFAQIHTVREETMMVMTEDMPLEISYVPSTYLTEITHVSQALLEVEQLLNAPDLCAKDFEDLFKQEESLKNIKDSLQQSSGRIDIIHSKKTAALQSATPVERVKLQEALSQLDFQWEKVNKMYKDRQGRFDRSVEKWRRFHYDIKIFNQWLTEAEQFLRKTQIPENWEHAKYKWYLKELQDGIGQRQTVVRTLNATGEEIIQQSSKTDASILQEKLGSLNLRWQEVCKQLSDRKKRLEEQKNILSEFQRDLNEFVLWLEEADNIASIPLEPGKEQQLKEKLEQVKLLVEELPLRQGILKQLNETGGPVLVSAPISPEEQDKLENKLKQTNLQWIKVSRALPEKQGEIEAQIKDLGQLEKKLEDLEEQLNHLLLWLSPIRNQLEIYNQPNQEGPFDVKETEIAVQAKQPDVEEILSKGQHLYKEKPATQPVKRKLEDLSSEWKAVNRLLQELRAKQPDLAPGLTTIGASPTQTVTLVTQPVVTKETAISKLEMPSSLMLEVPALADFNRAWTELTDWLSLLDQVIKSQRVMVGDLEDINEMIIKQKATMQDLEQRRPQLEELITAAQNLKNKTSNQEARTIITDRIERIQNQWDEVQEHLQNRRQQLNEMLKDSTQWLEAKEEAEQVLGQARAKLESWKEGPYTVDAIQKKITETKQLAKDLRQWQTNVDVANDLALKLLRDYSADDTRKVHMITENINASWRSIHKRVSEREAALEETHRLLQQFPLDLEKFLAWLTEAETTANVLQDATRKERLLEDSKGVKELMKQWQDLQGEIEAHTDVYHNLDENSQKILRSLEGSDDAVLLQRRLDNMNFKWSELRKKSLNIRSHLEASSDQWKRLHLSLQELLVWLQLKDDELSRQAPIGGDFPAVQKQNDVHRAFKRELKTKEPVIMSTLETVRIFLTEQPLEGLEKLYQEPRELPPEERAQNVTRLLRKQAEEVNTEWEKLNLHSADWQRKIDETLERLRELQEATDELDLKLRQAEVIKGSWQPVGDLLIDSLQDHLEKVKALRGEIAPLKENVSHVNDLARQLTTLGIQLSPYNLSTLEDLNTRWKLLQVAVEDRVRQLHEAHRDFGPASQHFLSTSVQGPWERAISPNKVPYYINHETQTTCWDHPKMTELYQSLADLNNVRFSAYRTAMKLRRLQKALCLDLLSLSAACDALDQHNLKQNDQPMDILQIINCLTTIYDRLEQEHNNLVNVPLCVDMCLNWLLNVYDTGRTGRIRVLSFKTGIISLCKAHLEDKYRYLFKQVASSTGFCDQRRLGLLLHDSIQIPRQLGEVASFGGSNIEPSVRSCFQFANNKPEIEAALFLDWMRLEPQSMVWLPVLHRVAAAETAKHQAKCNICKECPIIGFRYRSLKHFNYDICQSCFFSGRVAKGHKMHYPMVEYCTPTTSGEDVRDFAKVLKNKFRTKRYFAKHPRMGYLPVQTVLEGDNMETPVTLINFWPVDSAPASSPQLSHDDTHSRIEHYASRLAEMENSNGSYLNDSISPNESIDDEHLLIQHYCQSLNQDSPLSQPRSPAQILISLESEERGELERILADLEEENRNLQAEYDRLKQQHEHKGLSPLPSPPEMMPTSPQSPRDAELIAEAKLLRQHKGRLEARMQILEDHNKQLESQLHRLRQLLEQPQAEAKVNGTTVSSPSTSLQRSDSSQPMLLRVVGSQTSDSMGEEDLLSPPQDTSTGLEEVMEQLNNSFPSSRGRNTPGKPMREDTM

SEQ ID NO: 29337 - protein, 3713 aa, Artificial Sequence; identical to SEQ ID NO: 29336
  Synthetic polypeptide

SEQ ID NO: 29338 - protein, 37 aa, Artificial Sequence
  Synthetic polypeptide
DATPFFWKLQRKGTQKPGIPAIRMKEKMFKRKHSQNG

SEQ ID NO: 29339 - protein, 37 aa, Artificial Sequence; identical to SEQ ID NO: 29338
  Synthetic polypeptide

SEQ ID NO: 29340 - protein, 37 aa, Artificial Sequence; identical to SEQ ID NO: 29338
  Synthetic polypeptide

SEQ ID NO: 29341 - protein, 37 aa, Artificial Sequence; identical to SEQ ID NO: 29338
  Synthetic polypeptide

SEQ ID NO: 29342 - protein, 37 aa, Artificial Sequence; identical to SEQ ID NO: 29338
  Synthetic polypeptide

SEQ ID NO: 29343 - protein, 129 aa, Artificial Sequence
  Synthetic polypeptide
SGLNPTAIAQASRVVRRHSVLLEAAEKGNPETWHPSNKDEREDVQKKTFTKWVNAQFSKATQKEIEKQKVHLKSITEVGEALKTVLGKKETLVEDKLSLLNSNWIAVTSRAEEWLNLLLEYQKHMETFD

SEQ ID NO: 29344 - protein, 69 aa, Artificial Sequence
  Synthetic polypeptide
SGLNPTAIAQASRVVRRHSVLLEAAEKGNPETWHPSNKDEREDVQKKTFTKWVNAQFSKEYQKHMETFD

SEQ ID NO: 29345 - protein, 808 aa, Artificial Sequence
  Synthetic polypeptide
SGLNPTAIAQASRVVRRHSVLLEAAEKGNPETWHPSNKDEREDVQKKTFTKWVNAQFSKFGKQHIENLFSDLQDGRRLLDLLEGLTGQKLPKEKGSTRVHALNNVNKALRVLQNNNVDLVNIGSTDIVDGNHKLTLGLIWNIILHWQVKNVMKNIMAGLQQTNSEKILLSWVRQSTRNYPQVNVINFTTSWSDGLALNALIHSHRPDLFDWNSVVCQQSATQRLEHAFNIARYQLGIEKLLDPEDVDTTYPDKKSILMYITSLFQVLPQQVSIEAIQEVEMLPRPPKVTKEEHFQLHHQMHYSQQITVSLAQGYERTSSPKPRFKSYAYTQAAYVTTSDPTRSPFPSQHLEAPEDKSFGSSLMESEVNLDRYQTALEEVLSWLLSAEDTLQAQGEISNDVEVVKDQFHTHEGYMMDLTAHQGRVGNILQLGSKLIGTGKLSEDEETEVQEQMNLLNSRWECLRVASMEKQSNLHRVLMDLQNQKLKELNDWLTKTEERTRKMEEEPLGPDLEDLKRQVQQHKVLQEDLEQEQVRVNSLTHMVVVVDESSGDHATAALEEQLKVLGDRWANICRWTEDRWVLLQDILLKWQRLTEEQCLFSAWLSEKEDAVNKIHTTGFKDQNEMLSSLQKLAVLKADLEKKKQSMGKLYSLKQDLLSTLKNKSVTQKTEAWLDNFARCWDNLVQKLEKSTAQISQAVTTTQPSLTQTTVMETVTTVTTREQILVKHAQEELPPPPPQKKRQITVDSEIRKRLDVDITELHSWITRSEAVLQSPEFAIFRKEGNFSDLKEKVNVGYALIFISVLILCCL

SEQ ID NO: 29346 - protein, 22 aa, Artificial Sequence
  Synthetic polypeptide
SKNNRRMLARVQRQGNAYTLLV

SEQ ID NO: 29347 - protein, 21 aa, Artificial Sequence
  Synthetic polypeptide
PKTTDACWQEYRDKGMLIHCW

SEQ ID NO: 29348 - protein, 21 aa, Artificial Sequence
  Synthetic polypeptide
QKQQTHVGKSTETRECLYTVG

SEQ ID NO: 29349 - protein, 22 aa, Artificial Sequence
  Synthetic polypeptide
SKNNRRMLARVQRQGNAYTLLV

SEQ ID NO: 29350 - protein, 21 aa, Artificial Sequence
  Synthetic polypeptide
PKTTDACWQEYRDKGMLIHCW

SEQ ID NO: 29351 - protein, 21 aa, Artificial Sequence
  Synthetic polypeptide
QKQQTHVGKSTETRECLYTVG

SEQ ID NO: 29352 - protein, 506 aa, Artificial Sequence
  Synthetic polypeptide
MGMAAAKLLHDSGLNVVVLEARDRVGGRTYTLRNQKVKYVDLGGSYVGPTQNRILRLAKELGLETYKVNEVERLIHHVKGKSYPFRGPFPPVWNPITYLDHNNFWRTMDDMGREIPSDAPWKAPLAEEWDNMTMKELLDKLCWTESAKQLATLFVNLCVTAETHEVSALWFLWYVKQCGGTTRIISTTNGGQERKFVGGSGQVSERIMDLLGDRVKLERPVIYIDQTRENVLVETLNHEMYEAKYVISAIPPTLGMKIHFNPPLPMMRNQMITRVPLGSVIKCIVYYKEPFWRKKDYCGTMIIDGEEAPVAYTLDDTKPEGNYAAIMGFILAHKARKLARLTKEERLKKLCELYAKVLGSLEALEPVHYEEKNWCEEQYSGGCYTTYFPPGILTQYGRVLRQPVDRIYFAGTETATHWSGYMEGAVEAGERAAREILHAMGKIPEDEIWQSEPESVDVPAQPITTTFLERHLPSVPGLLRLIGLTTIFSATALGFLAHKRGLLVRV

SEQ ID NO: 29353 - protein, 13 aa, Artificial Sequence
  Synthetic polypeptide
WVWQQPNFCMTLD

SEQ ID NO: 29354 - protein, 17 aa, Artificial Sequence
  Synthetic polypeptide
HCAQPPDAFKEPRLPWL

SEQ ID NO: 29355 - protein, 17 aa, Artificial Sequence
  Synthetic polypeptide
HCAQPPDAFKEPRLPWL

SEQ ID NO: 29356 - protein, 94 aa, Artificial Sequence
  Synthetic polypeptide
TAPSLQMLLKNPDSHGYDKDPVLDVWNMRLVFFFGVSIILVLGSTFVAYLPDYRMKEWSRREAERLVKYREANGLPIMESNCFDPSKIQLPEDE

SEQ ID NO: 29357 - protein, 104 aa, Artificial Sequence
  Synthetic polypeptide
TAPSLQMLLKNPDSHGYDKDPVLDVWNMRLVFFFGVSIILVLGSTFVAYLPDYRCTGCPRAWDGMKEWSRREAERLVKYREANGLPIMESNCFDPSKIQLPEDE

SEQ ID NO: 29358 - protein, 66 aa, Artificial Sequence
  Synthetic polypeptide
WSAVWICKSDHLGSDLRCPARRCPRNVACPGLIQSRVLTAPLPSPCCPKCPRCQPTEWPRTAVKQT

SEQ ID NO: 29359 - protein, 66 aa, Artificial Sequence; identical to SEQ ID NO: 29358
  Synthetic polypeptide

SEQ ID NO: 29360 - protein, 66 aa, Artificial Sequence; identical to SEQ ID NO: 29358
  Synthetic polypeptide

SEQ ID NO: 29361 - protein, 66 aa, Artificial Sequence; identical to SEQ ID NO: 29358
  Synthetic polypeptide

SEQ ID NO: 29362 - protein, 66 aa, Artificial Sequence; identical to SEQ ID NO: 29358
  Synthetic polypeptide

SEQ ID NO: 29363 - protein, 66 aa, Artificial Sequence; identical to SEQ ID NO: 29358
  Synthetic polypeptide

SEQ ID NO: 29364 - protein, 66 aa, Artificial Sequence; identical to SEQ ID NO: 29358
  Synthetic polypeptide

SEQ ID NO: 29365 - protein, 36 aa, Artificial Sequence
  Synthetic polypeptide
SKWLSGQQCGFANQTTWVQILDVQLAAVQETSRVRA

SEQ ID NO: 29366 - protein, 36 aa, Artificial Sequence; identical to SEQ ID NO: 29365
  Synthetic polypeptide

SEQ ID NO: 29367 - protein, 36 aa, Artificial Sequence; identical to SEQ ID NO: 29365
  Synthetic polypeptide

SEQ ID NO: 29368 - protein, 36 aa, Artificial Sequence; identical to SEQ ID NO: 29365
  Synthetic polypeptide

SEQ ID NO: 29369 - protein, 36 aa, Artificial Sequence; identical to SEQ ID NO: 29365
  Synthetic polypeptide

SEQ ID NO: 29370 - protein, 36 aa, Artificial Sequence; identical to SEQ ID NO: 29365
  Synthetic polypeptide

SEQ ID NO: 29371 - protein, 36 aa, Artificial Sequence; identical to SEQ ID NO: 29365
  Synthetic polypeptide

SEQ ID NO: 29372 - protein, 36 aa, Artificial Sequence
  Synthetic polypeptide
CPALPRHSTERPHQQKALTRCDSLTMDFPASRTAHC

SEQ ID NO: 29373 - protein, 36 aa, Artificial Sequence; identical to SEQ ID NO: 29372
  Synthetic polypeptide

SEQ ID NO: 29374 - protein, 36 aa, Artificial Sequence; identical to SEQ ID NO: 29372
  Synthetic polypeptide

SEQ ID NO: 29375 - protein, 31 aa, Artificial Sequence
  Synthetic polypeptide
PWTSQPPELPIARRLGHNQPQRCHWLRRVAG

SEQ ID NO: 29376 - protein, 31 aa, Artificial Sequence; identical to SEQ ID NO: 29375
  Synthetic polypeptide

SEQ ID NO: 29377 - protein, 31 aa, Artificial Sequence; identical to SEQ ID NO: 29375
  Synthetic polypeptide

SEQ ID NO: 29378 - protein, 570 aa, Artificial Sequence
  Synthetic polypeptide
LLDHGLPSLQNCPLLEDWDIISPKDVIGSDVLLAEKRSSLTTAALPFTQSILTQVGRTLSKVQQVLSWSYGEDVKPFKPPLSDAEFHTYLNHEGQLSRPEELRLRIYHGGVEPSLRKVVWRYLLNVYPDGLTGRERMDYMKRKSREYEQLKSEWAQRANPEDLEFIRSTVLKDVLRTDRAHPYYAGPEDGPHLRALHDLLTTYAVTHPQVSYCQGMSDLASPILAVMDHEGHAFVCFCGIMKRLAANFHPDGRAMATKFAHLKLLLRHADPDFYQYLQEAGADDLFFCYRWLLLELKREFAFDDALRMLEVTWSSLPPDPPEHEVELVGPPSQVADAGFGGHRGWPVRQRHMLRPAGGGGSTFEDAVDHLATASQGPGGGGRLLRQASLDGLQQLRDNMGSRRDPLVQLPHPAALISSKSLSEPLLNSPDPLLSSFSHPDSPSSSSPPSTQEASPTGDMAVGSPLMQEVGSPKDPGKSLPPVPPMGLPPPQEFGRGNPFMLFLCLAILLEHRDHIMRNGLDYNELAMHFDRLVRKHHLGRVLRRARALFADYLQSEVWDSEEGAEATAAS

SEQ ID NO: 29379 - protein, 34 aa, Artificial Sequence
  Synthetic polypeptide
LLDHGLPSLQNCPLLEDWDIISPKDVIGSDVLLA

SEQ ID NO: 29380 - protein, 96 aa, Artificial Sequence
  Synthetic polypeptide
LLDHGLPSLQNCPLLEDWDIISPKDVIGSDVLLAEKRSSLTTAALPFTQSILTQVGRTLSKVQQVLSWSYGEDVKPFKPPLSDAEFHTYLNHEGQL

SEQ ID NO: 29381 - protein, 243 aa, Artificial Sequence
  Synthetic polypeptide
QESQRAIHTSMFIIALFTIAKEPRGLSAASPPLAETGAPRRFRRSVPRGEAAGAVQELARALAHLLEAERQERARAEAQEAEDQQARVLAQLLRVWGAPRNSDPALGLDDDPDAPAAQLARALLRARLDPAALAAQLVPAPVPAAALRPRPPVYDDGPAGPDAEEAGDETPDVDPELLRYLLGRILAGSADSEGVAAPRRLRRAADHDVGSELPPEGVLGALLRVKRLETPAPQVPARRLLPP

SEQ ID NO: 29382 - protein, 6 aa, Artificial Sequence
  Synthetic polypeptide
PRSPAA

SEQ ID NO: 29383 - protein, 33 aa, Artificial Sequence
  Synthetic polypeptide
GISKSYPHFHVHHSIIYHSQGAPRPKRSVSALG

SEQ ID NO: 29384 - protein, 132 aa, Artificial Sequence
  Synthetic polypeptide
EGREQTYLVHGCIPAYGMVLGTYSSFAVWGGLFSTIDCGLVRLRGKEDPWNSITSGALTGAVLAARSGPLAMVGSAMMGGILLALIEGVGILLTRYTAQQFRNAPPFLEDPSQLPPKDGTPAPGYPSYQQYH

SEQ ID NO: 29385 - protein, 132 aa, Artificial Sequence; identical to SEQ ID NO: 29384
  Synthetic polypeptide

SEQ ID NO: 29386 - protein, 132 aa, Artificial Sequence; identical to SEQ ID NO: 29384
  Synthetic polypeptide

SEQ ID NO: 29387 - protein, 132 aa, Artificial Sequence; identical to SEQ ID NO: 29384
  Synthetic polypeptide

SEQ ID NO: 29388 - protein, 128 aa, Artificial Sequence
  Synthetic polypeptide
WNSPPWIFAQVCHPQGLSTDSPSFKRPFLTPQPQSYFFMAFPLQCRLLSEAPLFIYSCSRSVSPTVNVSSERAESRPTLFMAVSLHMAWCLAHIVASQCGGACSPPLTVAWCGFGARRIPGTLSPVEH

SEQ ID NO: 29389 - protein, 128 aa, Artificial Sequence; identical to SEQ ID NO: 29388
  Synthetic polypeptide

SEQ ID NO: 29390 - protein, 128 aa, Artificial Sequence; identical to SEQ ID NO: 29388
  Synthetic polypeptide

SEQ ID NO: 29391 - protein, 128 aa, Artificial Sequence; identical to SEQ ID NO: 29388
  Synthetic polypeptide

SEQ ID NO: 29392 - protein, 128 aa, Artificial Sequence; identical to SEQ ID NO: 29388
  Synthetic polypeptide

SEQ ID NO: 29393 - protein, 70 aa, Artificial Sequence
  Synthetic polypeptide
EGREQTYLVHGCIPAYGMVLGTYSSFAVWGGLFSTIDCGLVRLRGKEDPWNSITSGALTGAVLAARSGPL

SEQ ID NO: 29394 - protein, 4 aa, Artificial Sequence
  Synthetic polypeptide
VKLN

SEQ ID NO: 29395 - protein, 4 aa, Artificial Sequence
  Synthetic polypeptide
VKLN

SEQ ID NO: 29396 - protein, 4 aa, Artificial Sequence
  Synthetic polypeptide
VKLN

SEQ ID NO: 29397 - protein, 4 aa, Artificial Sequence
  Synthetic polypeptide
VKLN

SEQ ID NO: 29398 - protein, 4 aa, Artificial Sequence
  Synthetic polypeptide
VKLN

SEQ ID NO: 29399 - protein, 23 aa, Artificial Sequence
  Synthetic polypeptide
AKLTRCMETRTCMRLCESIAWTI

SEQ ID NO: 29400 - protein, 23 aa, Artificial Sequence
  Synthetic polypeptide
AKLTRCMETRTCMRLCESIAWTI

SEQ ID NO: 29401 - protein, 23 aa, Artificial Sequence
  Synthetic polypeptide
AKLTRCMETRTCMRLCESIAWTI

SEQ ID NO: 29402 - protein, 23 aa, Artificial Sequence
  Synthetic polypeptide
AKLTRCMETRTCMRLCESIAWTI

SEQ ID NO: 29403 - protein, 23 aa, Artificial Sequence
  Synthetic polypeptide
AKLTRCMETRTCMRLCESIAWTI

SEQ ID NO: 29404 - protein, 9 aa, Artificial Sequence
  Synthetic polypeptide
VIYEGYQSP

SEQ ID NO: 29405 - protein, 9 aa, Artificial Sequence
  Synthetic polypeptide
VIYEGYQSP

SEQ ID NO: 29406 - protein, 9 aa, Artificial Sequence
  Synthetic polypeptide
VIYEGYQSP

SEQ ID NO: 29407 - protein, 1423 aa, Artificial Sequence
  Synthetic polypeptide
YLRGRLFMKGISLPEGVDPSFLAALPDDIRREVLQNQLGIRPPTRTAPSTNSSAPAVVGNPGVTEVSPEFLAALPPAIQEEVLAQQRAEQQRRELAQNASSDTPMDPVTFIQTLPSDLRRSVLEDMEDSVLAVMPPDIAAEAQALRREQEARQRQLMHERLFGHSSTSALSAILRSPAFTSRLSGNRGVQYTRLAVQRGGTFQMGGSSSHNRPSGSNVDTLLRLRGRLLLDHEALSCLLVLLFVDEPKLNTSRLHRVLRNLCYHAQTRHWVIRSLLSILQRSSESELCIETPKLTTSEEKGKKSSKSCGSSSHENRPLDLLHKMESKSSNQLSWLSVSMDAALGCRTNIFQIQRSGGRKHTEKHASGGSTVHIHPQAAPVVCRHVLDTLIQLAKVFPSHFTQQRTKETNCESDRERGNKACSPCSSQSSSSGICTDFWDLLVKLDNMNVSRKGKNSVKSVPVSAGGEGETSPYSLEASPLGQLMNMLSHPVIRRSSLLTEKLLRLLSLISIALPENKVSEAQANSGSGASSTTTATSTTSTTTTTAASTTPTPPTAPTPVTSAPALVAATAISTIVVAASTTVTTPTTATTTVSISPTTKGSKSPAKVSDGGSSSTDFKMVSSGLTENQLQLSVEVLTSHSCSEEGLEDAANVLLQLSRGDSGTRDTVLKLLLNGARHLGYTLCKQIGTLLAELREYNLEQQRRAQCETLSPDGLPEEQPQTTKLKGKMQSRFDMAENVVIVASQKRPLGGRELQLPSMSMLTSKTSTQKFFLRVLQVIIQLRDDTRRANKKAKQTGRLGSSGLGSASSIQAAVRQLEAEADAIIQMVREGQRARRQQQAATSESSQSEASVRREESPMDVDQPSPSAQDTQSIASDGTPQGEKEKEERPPELPLLSEQLSLDELWDMLGECLKELEESHDQHAVLVLQPAVEAFFLVHATERESKPPVRDTRESQLAHIKDEPPPLSPAPLTPATPSSLDPFFSREPSSMHISSSLPPDTQKFLRFAETHRTVLNQILRQSTTHLADGPFAVLVDYIRVLDFDVKRKYFRQELERLDEGLRKEDMAVHVRRDHVFEDSYRELHRKSPEEMKNRLYIVFEGEEGQDAGGLLREWYMIISREMFNPMYALFRTSPGDRVTYTINPSSHCNPNHLSYFKFVGRIVAKAVYDNRLLECYFTRSFYKHILGKSVRYTDMESEDYHFYQGLVYLLENDVSTLGYDLTFSTEVQEFGVCEVRDLKPNGANILVTEENKKEYVHLVCQMRMTGAIRKQLAAFLEGFYEIIPKRLISIFTEQELELLISGLPTIDIDDLKSNTEYHKYQSNSIQIQWFWRALRSFDQADRAKFLQFVTGTSKVPLQGFAALEGMNGIQKFQIHRDDRSTDRLPSAHTCFNQLDLPAYESFEKLRHMLLLAIQECSEGFGLA

SEQ ID NO: 29408 - protein, 1423 aa, Artificial Sequence; identical to SEQ ID NO: 29407
  Synthetic polypeptide

SEQ ID NO: 29409 - protein, 1423 aa, Artificial Sequence; identical to SEQ ID NO: 29407
  Synthetic polypeptide

SEQ ID NO: 29410 - protein, 29 aa, Artificial Sequence
  Synthetic polypeptide
RVSVSLKVWTPLFWLPCLMTSVGKFYRTS

SEQ ID NO: 29411 - protein, 29 aa, Artificial Sequence
  Synthetic polypeptide
RVSVSLKVWTPLFWLPCLMTSVGKFYRTS

SEQ ID NO: 29412 - protein, 29 aa, Artificial Sequence
  Synthetic polypeptide
RVSVSLKVWTPLFWLPCLMTSVGKFYRTS

SEQ ID NO: 29413 - protein, 27 aa, Artificial Sequence
  Synthetic polypeptide
KCNEVLIRAGVERRMALDLQNVAETCI

SEQ ID NO: 29414 - protein, 27 aa, Artificial Sequence
  Synthetic polypeptide
KCNEVLIRAGVERRMALDLQNVAETCI

SEQ ID NO: 29415 - protein, 27 aa, Artificial Sequence
  Synthetic polypeptide
KCNEVLIRAGVERRMALDLQNVAETCI

SEQ ID NO: 29416 - protein, 46 aa, Artificial Sequence
  Synthetic polypeptide
KSQENIENVMKYLLELGWKGEWLWTCRMLQRLAYDEISTQCNYTTL

SEQ ID NO: 29417 - protein, 46 aa, Artificial Sequence; identical to SEQ ID NO: 29416
  Synthetic polypeptide

SEQ ID NO: 29418 - protein, 46 aa, Artificial Sequence; identical to SEQ ID NO: 29416
  Synthetic polypeptide

SEQ ID NO: 29419 - protein, 10 aa, Artificial Sequence
  Synthetic polypeptide
PAANSLAEFS

SEQ ID NO: 29420 - protein, 10 aa, Artificial Sequence
  Synthetic polypeptide
PAANSLAEFS

SEQ ID NO: 29421 - protein, 17 aa, Artificial Sequence
  Synthetic polypeptide
MLLTHWLNLADHWRFHR

SEQ ID NO: 29422 - protein, 17 aa, Artificial Sequence
  Synthetic polypeptide
MLLTHWLNLADHWRFHR

SEQ ID NO: 29423 - protein, 194 aa, Artificial Sequence
  Synthetic polypeptide
DHFLGCFTRHSCISGRYKQKKELEHRLSAMKSAVESGQADDERVREYYLLHLQRWIDISLEEIESIDQEIKILRERDSSREASTSNSSRQERPPVKPFILTRNMAQAKVFGAGYPSLPTMTVSDWYEQHRKYGALPDQGIAKAAPEEFRKAAQQQEEQEEKEEEDDEQTLHRAREWDDWKDTHPRGYGNRQNMG

SEQ ID NO: 29424 - protein, 194 aa, Artificial Sequence; identical to SEQ ID NO: 29423
  Synthetic polypeptide

SEQ ID NO: 29425 - protein, 25 aa, Artificial Sequence
  Synthetic polypeptide
AVSQGIPASVADTSRRRSWSIGCLQ

SEQ ID NO: 29426 - protein, 25 aa, Artificial Sequence
  Synthetic polypeptide
AVSQGIPASVADTSRRRSWSIGCLQ

SEQ ID NO: 29427 - protein, 24 aa, Artificial Sequence
  Synthetic polypeptide
SFFRLFHKAFLHQWQIQAEEGVGA

SEQ ID NO: 29428 - protein, 24 aa, Artificial Sequence
  Synthetic polypeptide
SFFRLFHKAFLHQWQIQAEEGVGA

SEQ ID NO: 29429 - protein, 22 aa, Artificial Sequence
  Synthetic polypeptide
DHFLGCFTRHSCISGRGGLISA

SEQ ID NO: 29430 - protein, 22 aa, Artificial Sequence
  Synthetic polypeptide
DHFLGCFTRHSCISGRGGLISA

SEQ ID NO: 29431 - protein, 14 aa, Artificial Sequence
  Synthetic polypeptide
AVSQGIPASVAEVD

SEQ ID NO: 29432 - protein, 14 aa, Artificial Sequence
  Synthetic polypeptide
AVSQGIPASVAEVD

SEQ ID NO: 29433 - protein, 156 aa, Artificial Sequence
  Synthetic polypeptide
SFFRLFHKAFLHQWQRWIDISLEEIESIDQEIKILRERDSSREASTSNSSRQERPPVKPFILTRNMAQAKVFGAGYPSLPTMTVSDWYEQHRKYGALPDQGIAKAAPEEFRKAAQQQEEQEEKEEEDDEQTLHRAREWDDWKDTHPRGYGNRQNMG

SEQ ID NO: 29434 - protein, 156 aa, Artificial Sequence; identical to SEQ ID NO: 29433
  Synthetic polypeptide

SEQ ID NO: 29435 - protein, 32 aa, Artificial Sequence
  Synthetic polypeptide
GRARWLTPVIPTLLEAKNTVALNRRYMTYENK

SEQ ID NO: 29436 - protein, 32 aa, Artificial Sequence; identical to SEQ ID NO: 29435
  Synthetic polypeptide

SEQ ID NO: 29437 - protein, 32 aa, Artificial Sequence; identical to SEQ ID NO: 29435
  Synthetic polypeptide

SEQ ID NO: 29438 - protein, 12 aa, Artificial Sequence
  Synthetic polypeptide
SQHFWRPRIQSL

SEQ ID NO: 29439 - protein, 12 aa, Artificial Sequence
  Synthetic polypeptide
SQHFWRPRIQSL

SEQ ID NO: 29440 - protein, 12 aa, Artificial Sequence
  Synthetic polypeptide
SQHFWRPRIQSL

SEQ ID NO: 29441 - protein, 379 aa, Artificial Sequence
  Synthetic polypeptide
PGAVAHTCNPNTFGGQEYSRFESKIHDLREQMMNSSMSSGSGSLRTSEKRSLYVRALFDYDRTRDSCLPSQGLSFSYGDILHVINASDDEWWQARLVTPHGESEQIGVIPSKKRVEKKERARLKTVKFHARTGMIESNRDFPGLSDDYYGAKNLKGVTSNTSDSESSSKGQEDAILSYEPVTRQEIHYARPVIILGPMKDRVNDDLISEFPHKFGSCVPHTTRPRRDNEVDGQDYHFVVSREQMEKDIQDNKFIEAGQFNDNLYGTSIQSVRAVAERGKHCILDVSGNAIKRLQQAQLYPIAIFIKPKSIEALMEMNRRQTYEQANKIYDKAMKLEQEFGEYFTAIVQGDSLEEIYNKIKQIIEDQSGHYIWVPSPEKL

SEQ ID NO: 29442 - protein, 365 aa, Artificial Sequence
  Synthetic polypeptide
PGAVAHTCNPNTFGGQEYSRFESKIHDLREQMMNSSMSSGSGSLRTSEKRSLYVRALFDYDRTRDSCLPSQGLSFSYGDILHVINASDDEWWQARLVTPHGESEQIGVIPSKKRVEKKERARLKTVKFHARTGMIESNRDFPGLSDDYYGAKNLKGQEDAILSYEPVTRQEIHYARPVIILGPMKDRVNDDLISEFPHKFGSCVPHTTRPRRDNEVDGQDYHFVVSREQMEKDIQDNKFIEAGQFNDNLYGTSIQSVRAVAERGKHCILDVSGNAIKRLQQAQLYPIAIFIKPKSIEALMEMNRRQTYEQANKIYDKAMKLEQEFGEYFTAIVQGDSLEEIYNKIKQIIEDQSGHYIWVPSPEKL

SEQ ID NO: 29443 - protein, 397 aa, Artificial Sequence
  Synthetic polypeptide
PGAVAHTCNPNTFGGQEYSRFESKIHDLREQMMNSSMSSGSGSLRTSEKRSLYVRALFDYDRTRDSCLPSQGLSFSYGDILHVINASDDEWWQARLVTPHGESEQIGVIPSKKRVEKKERARLKTVKFHARTGMIESNRSIKTKRKKSFRLSRKFPFYKSKENMAQESSIQEQGVTSNTSDSESSSKGQEDAILSYEPVTRQEIHYARPVIILGPMKDRVNDDLISEFPHKFGSCVPHTTRPRRDNEVDGQDYHFVVSREQMEKDIQDNKFIEAGQFNDNLYGTSIQSVRAVAERGKHCILDVSGNAIKRLQQAQLYPIAIFIKPKSIEALMEMNRRQTYEQANKIYDKAMKLEQEFGEYFTAIVQGDSLEEIYNKIKQIIEDQSGHYIWVPSPEKL

SEQ ID NO: 29444 - protein, 119 aa, Artificial Sequence
  Synthetic polypeptide
DGENPFLFALEAVVISVGSMGLIISLLCVYFWLERTMPRIPTLKNLEDLVTEYHGNFSAWSGVSKGLAESLQPDYSERLCLVSEIPPKGGALGEGPGASPCNQHSPYWAPPCYTLKPET

SEQ ID NO: 29445 - protein, 119 aa, Artificial Sequence; identical to SEQ ID NO: 29444
  Synthetic polypeptide

SEQ ID NO: 29446 - protein, 31 aa, Artificial Sequence
  Synthetic polypeptide
TLGFCFLRCKMERILSCLHWKPWLSLLAPWD

SEQ ID NO: 29447 - protein, 31 aa, Artificial Sequence; identical to SEQ ID NO: 29446
  Synthetic polypeptide

SEQ ID NO: 29448 - protein, 53 aa, Artificial Sequence
  Synthetic polypeptide
DVRWRESFPVCIGSRGYLCWLHGIDYQPSLCVFLAGTDDAPNSHPEEPRGSCY

SEQ ID NO: 29449 - protein, 53 aa, Artificial Sequence; identical to SEQ ID NO: 29448
  Synthetic polypeptide

SEQ ID NO: 29450 - protein, 13 aa, Artificial Sequence
  Synthetic polypeptide
DGENPFLFALEAV

SEQ ID NO: 29451 - protein, 23 aa, Artificial Sequence
  Synthetic polypeptide
TLGFCFLRCKMERILSCLHWKPW

SEQ ID NO: 29452 - protein, 16 aa, Artificial Sequence
  Synthetic polypeptide
DVRWRESFPVCIGSRG

SEQ ID NO: 29453 - protein, 60 aa, Artificial Sequence
  Synthetic polypeptide
GASLPGRPSSEMWGAPLPRRPVWDVRSASAGRNPVWEGEQPLGVTVLTRRLKVPKVVAMQ

SEQ ID NO: 29454 - protein, 60 aa, Artificial Sequence; identical to SEQ ID NO: 29453
  Synthetic polypeptide

SEQ ID NO: 29455 - protein, 60 aa, Artificial Sequence; identical to SEQ ID NO: 29453
  Synthetic polypeptide

SEQ ID NO: 29456 - protein, 60 aa, Artificial Sequence; identical to SEQ ID NO: 29453
  Synthetic polypeptide

SEQ ID NO: 29457 - protein, 60 aa, Artificial Sequence; identical to SEQ ID NO: 29453
  Synthetic polypeptide

SEQ ID NO: 29458 - protein, 60 aa, Artificial Sequence; identical to SEQ ID NO: 29453
  Synthetic polypeptide

SEQ ID NO: 29459 - protein, 18 aa, Artificial Sequence
  Synthetic polypeptide
GAPLLAATLSGRGSSLWE

SEQ ID NO: 29460 - protein, 18 aa, Artificial Sequence
  Synthetic polypeptide
GAPLLAATLSGRGSSLWE

SEQ ID NO: 29461 - protein, 18 aa, Artificial Sequence
  Synthetic polypeptide
GAPLLAATLSGRGSSLWE

SEQ ID NO: 29462 - protein, 18 aa, Artificial Sequence
  Synthetic polypeptide
GAPLLAATLSGRGSSLWE

SEQ ID NO: 29463 - protein, 18 aa, Artificial Sequence
  Synthetic polypeptide
GAPLLAATLSGRGSSLWE

SEQ ID NO: 29464 - protein, 18 aa, Artificial Sequence
  Synthetic polypeptide
GAPLLAATLSGRGSSLWE

SEQ ID NO: 29465 - protein, 98 aa, Artificial Sequence
  Synthetic polypeptide
DVGSTSAPPPCLGCEERLCWPQPCLGGGAASGSDSADKKAQGPKGGGNAVKVRHILCEKHGKIMEAMEKLKSGMRFNEVAAQYSEDKARQGVCCSYYL

SEQ ID NO: 29466 - protein, 98 aa, Artificial Sequence; identical to SEQ ID NO: 29465
  Synthetic polypeptide

SEQ ID NO: 29467 - protein, 120 aa, Artificial Sequence
  Synthetic polypeptide
DVGSTSAPPPCLGCEERLCWPQPCLGGGAASGSDSADKKAQGPKGGGNAVKVRHILCEKHGKIMEAMEKLKSGMRFNEVAAQYSEDKARQGIPSLQQHAGHHRDLRSTLISLVSYLQTTP

SEQ ID NO: 29468 - protein, 120 aa, Artificial Sequence; identical to SEQ ID NO: 29467
  Synthetic polypeptide

SEQ ID NO: 29469 - protein, 143 aa, Artificial Sequence
  Synthetic polypeptide
DVGSTSAPPPCLGCEERLCWPQPCLGGGAASGSDSADKKAQGPKGGGNAVKVRHILCEKHGKIMEAMEKLKSGMRFNEVAAQYSEDKARQGGDLGWMTRGSMVGPFQEAAFALPVSGMDKPVFTDPPVKTKFGYHIIMVEGRK

SEQ ID NO: 29470 - protein, 96 aa, Artificial Sequence
  Synthetic polypeptide
DVGSTSAPPPCLGCEERLCWPQPCLGGGAASGSDSADKKAQGPKGGGNAVKVRHILCEKHGKIMEAMEKLKSGMRFNEVAAQYSEDKARQGAFRLR

SEQ ID NO: 29471 - protein, 84 aa, Artificial Sequence
  Synthetic polypeptide
GASLPGRPSSEMWGAPLPRRPVWDVRSASAGRNPVWEVRHILCEKHGKIMEAMEKLKSGMRFNEVAAQYSEDKARQGVCCSYYL

SEQ ID NO: 29472 - protein, 84 aa, Artificial Sequence; identical to SEQ ID NO: 29471
  Synthetic polypeptide

SEQ ID NO: 29473 - protein, 30 aa, Artificial Sequence
  Synthetic polypeptide
GAPLLAATLSGRSDTFYVKNMAKSWKPWKS

SEQ ID NO: 29474 - protein, 30 aa, Artificial Sequence; identical to SEQ ID NO: 29473
  Synthetic polypeptide

SEQ ID NO: 29475 - protein, 30 aa, Artificial Sequence; identical to SEQ ID NO: 29473
  Synthetic polypeptide

SEQ ID NO: 29476 - protein, 30 aa, Artificial Sequence; identical to SEQ ID NO: 29473
  Synthetic polypeptide

SEQ ID NO: 29477 - protein, 30 aa, Artificial Sequence; identical to SEQ ID NO: 29473
  Synthetic polypeptide

SEQ ID NO: 29478 - protein, 30 aa, Artificial Sequence; identical to SEQ ID NO: 29473
  Synthetic polypeptide

SEQ ID NO: 29479 - protein, 32 aa, Artificial Sequence
  Synthetic polypeptide
DVGSTSAPPPCLGCEERLCWPQPCLGGQTHSM

SEQ ID NO: 29480 - protein, 32 aa, Artificial Sequence; identical to SEQ ID NO: 29479
  Synthetic polypeptide

SEQ ID NO: 29481 - protein, 32 aa, Artificial Sequence; identical to SEQ ID NO: 29479
  Synthetic polypeptide

SEQ ID NO: 29482 - protein, 32 aa, Artificial Sequence; identical to SEQ ID NO: 29479
  Synthetic polypeptide

SEQ ID NO: 29483 - protein, 32 aa, Artificial Sequence; identical to SEQ ID NO: 29479
  Synthetic polypeptide

SEQ ID NO: 29484 - protein, 32 aa, Artificial Sequence; identical to SEQ ID NO: 29479
  Synthetic polypeptide

SEQ ID NO: 29485 - protein, 106 aa, Artificial Sequence
  Synthetic polypeptide
GASLPGRPSSEMWGAPLPRRPVWDVRSASAGRNPVWEVRHILCEKHGKIMEAMEKLKSGMRFNEVAAQYSEDKARQGIPSLQQHAGHHRDLRSTLISLVSYLQTTP

SEQ ID NO: 29486 - protein, 106 aa, Artificial Sequence; identical to SEQ ID NO: 29485
  Synthetic polypeptide

SEQ ID NO: 29487 - protein, 129 aa, Artificial Sequence
  Synthetic polypeptide
GASLPGRPSSEMWGAPLPRRPVWDVRSASAGRNPVWEVRHILCEKHGKIMEAMEKLKSGMRFNEVAAQYSEDKARQGGDLGWMTRGSMVGPFQEAAFALPVSGMDKPVFTDPPVKTKFGYHIIMVEGRK

SEQ ID NO: 29488 - protein, 82 aa, Artificial Sequence
  Synthetic polypeptide
GASLPGRPSSEMWGAPLPRRPVWDVRSASAGRNPVWEVRHILCEKHGKIMEAMEKLKSGMRFNEVAAQYSEDKARQGAFRLR

SEQ ID NO: 29489 - protein, 69 aa, Artificial Sequence
  Synthetic polypeptide
GASLPGRPSSEMWGAPLPRRPVWDVRSASAGRNPVWEVKSVSARPPRLRSEETLCLATAPSEKGSSLWE

SEQ ID NO: 29490 - protein, 69 aa, Artificial Sequence; identical to SEQ ID NO: 29489
  Synthetic polypeptide

SEQ ID NO: 29491 - protein, 69 aa, Artificial Sequence; identical to SEQ ID NO: 29489
  Synthetic polypeptide

SEQ ID NO: 29492 - protein, 69 aa, Artificial Sequence; identical to SEQ ID NO: 29489
  Synthetic polypeptide

SEQ ID NO: 29493 - protein, 69 aa, Artificial Sequence; identical to SEQ ID NO: 29489
  Synthetic polypeptide

SEQ ID NO: 29494 - protein, 69 aa, Artificial Sequence; identical to SEQ ID NO: 29489
  Synthetic polypeptide

SEQ ID NO: 29495 - protein, 86 aa, Artificial Sequence
  Synthetic polypeptide
EVRKPSAWQPPRLRRGAASGSDSADKKAQGPKGGGNAVKVRHILCEKHGKIMEAMEKLKSGMRFNEVAAQYSEDKARQGVCCSYYL

SEQ ID NO: 29496 - protein, 86 aa, Artificial Sequence; identical to SEQ ID NO: 29495
  Synthetic polypeptide

SEQ ID NO: 29497 - protein, 24 aa, Artificial Sequence
  Synthetic polypeptide
EGEQPLGVTVLTRRLKVPKVVAMQ

SEQ ID NO: 29498 - protein, 24 aa, Artificial Sequence
  Synthetic polypeptide
EGEQPLGVTVLTRRLKVPKVVAMQ

SEQ ID NO: 29499 - protein, 24 aa, Artificial Sequence
  Synthetic polypeptide
EGEQPLGVTVLTRRLKVPKVVAMQ

SEQ ID NO: 29500 - protein, 24 aa, Artificial Sequence
  Synthetic polypeptide
EGEQPLGVTVLTRRLKVPKVVAMQ

SEQ ID NO: 29501 - protein, 24 aa, Artificial Sequence
  Synthetic polypeptide
EGEQPLGVTVLTRRLKVPKVVAMQ

SEQ ID NO: 29502 - protein, 24 aa, Artificial Sequence
  Synthetic polypeptide
EGEQPLGVTVLTRRLKVPKVVAMQ

SEQ ID NO: 29503 - protein, 108 aa, Artificial Sequence
  Synthetic polypeptide
EVRKPSAWQPPRLRRGAASGSDSADKKAQGPKGGGNAVKVRHILCEKHGKIMEAMEKLKSGMRFNEVAAQYSEDKARQGIPSLQQHAGHHRDLRSTLISLVSYLQTTP

SEQ ID NO: 29504 - protein, 108 aa, Artificial Sequence; identical to SEQ ID NO: 29503
  Synthetic polypeptide

SEQ ID NO: 29505 - protein, 131 aa, Artificial Sequence
  Synthetic polypeptide
EVRKPSAWQPPRLRRGAASGSDSADKKAQGPKGGGNAVKVRHILCEKHGKIMEAMEKLKSGMRFNEVAAQYSEDKARQGGDLGWMTRGSMVGPFQEAAFALPVSGMDKPVFTDPPVKTKFGYHIIMVEGRK

SEQ ID NO: 29506 - protein, 84 aa, Artificial Sequence
  Synthetic polypeptide
EVRKPSAWQPPRLRRGAASGSDSADKKAQGPKGGGNAVKVRHILCEKHGKIMEAMEKLKSGMRFNEVAAQYSEDKARQGAFRLR

SEQ ID NO: 29507 - protein, 81 aa, Artificial Sequence
  Synthetic polypeptide
GASLPGRPSSEMWGAPLPRRPVWDVRSASAGRNPVWEVKSVSARPPRLRSEETLCLATAPSEKSDTFYVKNMAKSWKPWKS

SEQ ID NO: 29508 - protein, 81 aa, Artificial Sequence; identical to SEQ ID NO: 29507
  Synthetic polypeptide

SEQ ID NO: 29509 - protein, 81 aa, Artificial Sequence; identical to SEQ ID NO: 29507
  Synthetic polypeptide

SEQ ID NO: 29510 - protein, 81 aa, Artificial Sequence; identical to SEQ ID NO: 29507
  Synthetic polypeptide

SEQ ID NO: 29511 - protein, 81 aa, Artificial Sequence; identical to SEQ ID NO: 29507
  Synthetic polypeptide

SEQ ID NO: 29512 - protein, 81 aa, Artificial Sequence; identical to SEQ ID NO: 29507
  Synthetic polypeptide

SEQ ID NO: 29513 - protein, 20 aa, Artificial Sequence
  Synthetic polypeptide
EVRKPSAWQPPRLRSQTHSM

SEQ ID NO: 29514 - protein, 20 aa, Artificial Sequence
  Synthetic polypeptide
EVRKPSAWQPPRLRSQTHSM

SEQ ID NO: 29515 - protein, 20 aa, Artificial Sequence
  Synthetic polypeptide
EVRKPSAWQPPRLRSQTHSM

SEQ ID NO: 29516 - protein, 20 aa, Artificial Sequence
  Synthetic polypeptide
EVRKPSAWQPPRLRSQTHSM

SEQ ID NO: 29517 - protein, 20 aa, Artificial Sequence
  Synthetic polypeptide
EVRKPSAWQPPRLRSQTHSM

SEQ ID NO: 29518 - protein, 20 aa, Artificial Sequence
  Synthetic polypeptide
EVRKPSAWQPPRLRSQTHSM

SEQ ID NO: 29519 - protein, 48 aa, Artificial Sequence
  Synthetic polypeptide
EVRHILCEKHGKIMEAMEKLKSGMRFNEVAAQYSEDKARQGVCCSYYL

SEQ ID NO: 29520 - protein, 48 aa, Artificial Sequence; identical to SEQ ID NO: 29519
  Synthetic polypeptide

SEQ ID NO: 29521 - protein, 70 aa, Artificial Sequence
  Synthetic polypeptide
EVRHILCEKHGKIMEAMEKLKSGMRFNEVAAQYSEDKARQGIPSLQQHAGHHRDLRSTLISLVSYLQTTP

SEQ ID NO: 29522 - protein, 70 aa, Artificial Sequence; identical to SEQ ID NO: 29521
  Synthetic polypeptide

SEQ ID NO: 29523 - protein, 93 aa, Artificial Sequence
  Synthetic polypeptide
EVRHILCEKHGKIMEAMEKLKSGMRFNEVAAQYSEDKARQGGDLGWMTRGSMVGPFQEAAFALPVSGMDKPVFTDPPVKTKFGYHIIMVEGRK

SEQ ID NO: 29524 - protein, 46 aa, Artificial Sequence
  Synthetic polypeptide
EVRHILCEKHGKIMEAMEKLKSGMRFNEVAAQYSEDKARQGAFRLR

SEQ ID NO: 29525 - protein, 35 aa, Artificial Sequence
  Synthetic polypeptide
GAPPSGSHPVWEGEQPLGVTVLTRRLKVPKVVAMQ

SEQ ID NO: 29526 - protein, 35 aa, Artificial Sequence; identical to SEQ ID NO: 29525
  Synthetic polypeptide

SEQ ID NO: 29527 - protein, 35 aa, Artificial Sequence; identical to SEQ ID NO: 29525
  Synthetic polypeptide

SEQ ID NO: 29528 - protein, 35 aa, Artificial Sequence; identical to SEQ ID NO: 29525
  Synthetic polypeptide

SEQ ID NO: 29529 - protein, 35 aa, Artificial Sequence; identical to SEQ ID NO: 29525
  Synthetic polypeptide

SEQ ID NO: 29530 - protein, 35 aa, Artificial Sequence; identical to SEQ ID NO: 29525
  Synthetic polypeptide

SEQ ID NO: 29531 - protein, 34 aa, Artificial Sequence
  Synthetic polypeptide
EVRKPSAWQPPRLRSEEPLRLAATPSGKGSSLWE

SEQ ID NO: 29532 - protein, 34 aa, Artificial Sequence; identical to SEQ ID NO: 29531
  Synthetic polypeptide

SEQ ID NO: 29533 - protein, 34 aa, Artificial Sequence; identical to SEQ ID NO: 29531
  Synthetic polypeptide

SEQ ID NO: 29534 - protein, 34 aa, Artificial Sequence; identical to SEQ ID NO: 29531
  Synthetic polypeptide

SEQ ID NO: 29535 - protein, 34 aa, Artificial Sequence; identical to SEQ ID NO: 29531
  Synthetic polypeptide

SEQ ID NO: 29536 - protein, 34 aa, Artificial Sequence; identical to SEQ ID NO: 29531
  Synthetic polypeptide

SEQ ID NO: 29537 - protein, 86 aa, Artificial Sequence
  Synthetic polypeptide
EVRSPSVWQPPRLGRGAASGSDSADKKAQGPKGGGNAVKVRHILCEKHGKIMEAMEKLKSGMRFNEVAAQYSEDKARQGVCCSYYL

SEQ ID NO: 29538 - protein, 86 aa, Artificial Sequence; identical to SEQ ID NO: 29537
  Synthetic polypeptide

SEQ ID NO: 29539 - protein, 108 aa, Artificial Sequence
  Synthetic polypeptide
EVRSPSVWQPPRLGRGAASGSDSADKKAQGPKGGGNAVKVRHILCEKHGKIMEAMEKLKSGMRFNEVAAQYSEDKARQGIPSLQQHAGHHRDLRSTLISLVSYLQTTP

SEQ ID NO: 29540 - protein, 108 aa, Artificial Sequence; identical to SEQ ID NO: 29539
  Synthetic polypeptide

SEQ ID NO: 29541 - protein, 131 aa, Artificial Sequence
  Synthetic polypeptide
EVRSPSVWQPPRLGRGAASGSDSADKKAQGPKGGGNAVKVRHILCEKHGKIMEAMEKLKSGMRFNEVAAQYSEDKARQGGDLGWMTRGSMVGPFQEAAFALPVSGMDKPVFTDPPVKTKFGYHIIMVEGRK

SEQ ID NO: 29542 - protein, 84 aa, Artificial Sequence
  Synthetic polypeptide
EVRSPSVWQPPRLGRGAASGSDSADKKAQGPKGGGNAVKVRHILCEKHGKIMEAMEKLKSGMRFNEVAAQYSEDKARQGAFRLR

SEQ ID NO: 29543 - protein, 33 aa, Artificial Sequence
  Synthetic polypeptide
GAPPSGSHPVWEVRSVSARQPPRPGGRGSSLWE

SEQ ID NO: 29544 - protein, 33 aa, Artificial Sequence; identical to SEQ ID NO: 29543
  Synthetic polypeptide

SEQ ID NO: 29545 - protein, 33 aa, Artificial Sequence; identical to SEQ ID NO: 29543
  Synthetic polypeptide

SEQ ID NO: 29546 - protein, 33 aa, Artificial Sequence; identical to SEQ ID NO: 29543
  Synthetic polypeptide

SEQ ID NO: 29547 - protein, 33 aa, Artificial Sequence; identical to SEQ ID NO: 29543
  Synthetic polypeptide

SEQ ID NO: 29548 - protein, 33 aa, Artificial Sequence; identical to SEQ ID NO: 29543
  Synthetic polypeptide

SEQ ID NO: 29549 - protein, 85 aa, Artificial Sequence
  Synthetic polypeptide
GASPPGSHPVREGGGAASGSDSADKKAQGPKGGGNAVKVRHILCEKHGKIMEAMEKLKSGMRFNEVAAQYSEDKARQGVCCSYYL

SEQ ID NO: 29550 - protein, 85 aa, Artificial Sequence; identical to SEQ ID NO: 29549
  Synthetic polypeptide

SEQ ID NO: 29551 - protein, 52 aa, Artificial Sequence
  Synthetic polypeptide
EVRSPSVWQPPRLGSEERLRPAATPSGREGEQPLGVTVLTRRLKVPKVVAMQ

SEQ ID NO: 29552 - protein, 52 aa, Artificial Sequence; identical to SEQ ID NO: 29551
  Synthetic polypeptide

SEQ ID NO: 29553 - protein, 52 aa, Artificial Sequence; identical to SEQ ID NO: 29551
  Synthetic polypeptide

SEQ ID NO: 29554 - protein, 52 aa, Artificial Sequence; identical to SEQ ID NO: 29551
  Synthetic polypeptide

SEQ ID NO: 29555 - protein, 52 aa, Artificial Sequence; identical to SEQ ID NO: 29551
  Synthetic polypeptide

SEQ ID NO: 29556 - protein, 52 aa, Artificial Sequence; identical to SEQ ID NO: 29551
  Synthetic polypeptide

SEQ ID NO: 29557 - protein, 107 aa, Artificial Sequence
  Synthetic polypeptide
GASPPGSHPVREGGGAASGSDSADKKAQGPKGGGNAVKVRHILCEKHGKIMEAMEKLKSGMRFNEVAAQYSEDKARQGIPSLQQHAGHHRDLRSTLISLVSYLQTTP

SEQ ID NO: 29558 - protein, 107 aa, Artificial Sequence; identical to SEQ ID NO: 29557
  Synthetic polypeptide

SEQ ID NO: 29559 - protein, 130 aa, Artificial Sequence
  Synthetic polypeptide
GASPPGSHPVREGGGAASGSDSADKKAQGPKGGGNAVKVRHILCEKHGKIMEAMEKLKSGMRFNEVAAQYSEDKARQGGDLGWMTRGSMVGPFQEAAFALPVSGMDKPVFTDPPVKTKFGYHIIMVEGRK

SEQ ID NO: 29560 - protein, 83 aa, Artificial Sequence
  Synthetic polypeptide
GASPPGSHPVREGGGAASGSDSADKKAQGPKGGGNAVKVRHILCEKHGKIMEAMEKLKSGMRFNEVAAQYSEDKARQGAFRLR

SEQ ID NO: 29561 - protein, 232 aa, Artificial Sequence
  Synthetic polypeptide
DDGWGTCQAQRWSTEVLAQQLQLAASLPANLSNFCQGSEMPTTSRPALDVKGGTSPAKEDANQEMSSVAYSNLAVKDRKAVAILHYPGVASNGTKASGAPTSSSGSPIGSPTTTPPTKPPSFNLHPAPHLLASMHLQKLNSQYQGMAAATPGQPGEAGPLQNWDFGAQAGGAESLSPSAGAQSPAIIDSDPVDEEVLMSLVVELGLDRANELPELWLGQNEFDFTADFPSSC

SEQ ID NO: 29562 - protein, 232 aa, Artificial Sequence; identical to SEQ ID NO: 29561
  Synthetic polypeptide

SEQ ID NO: 29563 - protein, 91 aa, Artificial Sequence
  Synthetic polypeptide
TWAISRGSVSFTFGKPYLKGLSWELNEMMDGEHARPSAGAQRFSHNSSSWQHHFPPIYPTSAKALKCQQRRGLHLMSRVAPHLRRRMPTKR

SEQ ID NO: 29564 - protein, 91 aa, Artificial Sequence; identical to SEQ ID NO: 29563
  Synthetic polypeptide

SEQ ID NO: 29565 - protein, 91 aa, Artificial Sequence; identical to SEQ ID NO: 29563
  Synthetic polypeptide

SEQ ID NO: 29566 - protein, 91 aa, Artificial Sequence; identical to SEQ ID NO: 29563
  Synthetic polypeptide

SEQ ID NO: 29567 - protein, 91 aa, Artificial Sequence; identical to SEQ ID NO: 29563
  Synthetic polypeptide

SEQ ID NO: 29568 - protein, 36 aa, Artificial Sequence
  Synthetic polypeptide
WMGNMPGPALEHRGSRTTAPAGSITSRQFIQLLPRL

SEQ ID NO: 29569 - protein, 36 aa, Artificial Sequence; identical to SEQ ID NO: 29568
  Synthetic polypeptide

SEQ ID NO: 29570 - protein, 36 aa, Artificial Sequence; identical to SEQ ID NO: 29568
  Synthetic polypeptide

SEQ ID NO: 29571 - protein, 36 aa, Artificial Sequence; identical to SEQ ID NO: 29568
  Synthetic polypeptide

SEQ ID NO: 29572 - protein, 36 aa, Artificial Sequence; identical to SEQ ID NO: 29568
  Synthetic polypeptide

SEQ ID NO: 29573 - protein, 151 aa, Artificial Sequence
  Synthetic polypeptide
DDGWGTCQAQRWSTEVLAQQLQLAASLPANLSNFCQGSEMPTTSRPALDVKGGTSPAKEDANQEMSSVAYSNLAVKDRKAVAILHYPGVASNGTKASGAPTSSSGSPIGSPTTTPPTKPPSFNLHPAPHLLASMHLQKLNSQYQGMAAATP

SEQ ID NO: 29574 - protein, 122 aa, Artificial Sequence
  Synthetic polypeptide
DDGWGTCQAQRWSTEVLAQQLQLAASLPANLSNFCQGSEMPTTSRPALDVKGGTSPAKEDANQEMSSVAYSNLAVKDRKAVAILHYPGVASNGTKASGAPTSSSGSPIGSPTTTPPTKPPSF

SEQ ID NO: 29575 - protein, 72 aa, Artificial Sequence
  Synthetic polypeptide
DDGWGTCQAQRWSTEVLAQQLQLAASLPANLSNFCQGSEMPTTSRPALDVKGGTSPAKEDANQEMSSVAYSN

SEQ ID NO: 29576 - protein, 44 aa, Artificial Sequence
  Synthetic polypeptide
PDIRRELISLNGKLKKVKLLLLLIQAAQLQTGTKILLQMLMLRF

SEQ ID NO: 29577 - protein, 44 aa, Artificial Sequence; identical to SEQ ID NO: 29576
  Synthetic polypeptide

SEQ ID NO: 29578 - protein, 2 aa, Artificial Sequence
  Synthetic polypeptide
RR

SEQ ID NO: 29579 - protein, 2 aa, Artificial Sequence
  Synthetic polypeptide
RR

SEQ ID NO: 29580 - protein, 510 aa, Artificial Sequence
  Synthetic polypeptide
IEEGKATSSSNPSSPAPDWYKDFVTDADAEVLEHSGKMVLLFEILRMAEEIGDKVLVFSQSLISLDLIEDFLELASREKTEDKDKPLIYKGEGKWLRNIDYYRLDGSTTAQSRKKWAEEFNDETNVRGRLFIISTKAGSLGINLVAANRVIIFDASWNPSYDIQSIFRVYRFGQTKPVYVYRFLAQGTMEDKIYDRQVTKQSLSFRVVDQQQVERHFTMNELTELYTFEPDLLDDPNSEKKKKRDTPMLPKDTILAELLQIHKEHIVGYHEHDSLLDHKEEEELTEEERKAAWAEYEAEKKGLTMRFNIPTGTNLPPVSFNSQTPYIPFNLGALSAMSNQQLEDLINQGREKVVEATNSVTAVRIQPLEDIISAVWKENMNLSEAQVQALALSRQASQELDVKRREAIYNDVLTKQQMLISCVQRILMNRRLQQQYNQQQQQQMTYQQATLGHLMMPKPPNLIMNPSNYQQIDMRGMYQPVAGGMQPPPLQRAPPPMRSKNPGPSQGKSM

SEQ ID NO: 29581 - protein, 510 aa, Artificial Sequence; identical to SEQ ID NO: 29580
  Synthetic polypeptide

SEQ ID NO: 29582 - protein, 1441 aa, Artificial Sequence
  Synthetic polypeptide
DYKLLKKLFRETIWHLRFVSGSRDGTARIWQYQQQEWKSIVLDMATKMTGNNLPSGEDKITKLKVTMVAWDRYDTTVITAVNNFLLKVWNSITGQLLHTLSGHDDEVFVLEAHPFDQRIILSAGHDGNIFIWDLDRGTKIRNYFNMIEGQGHGAVFDCKFSPDGNHFACTDSHGHLLLFGFGCSKYYEKIPDQMFFHTDYRPLIRDANNYVLDEQTQQAPHLMPPPFLVDVDGNPHPTKFQRLVPGRENCKDEQLIPQLGYVANGDGEVVEQVIGQQTNDQDESILDGIIRELQREQDLRLINEGDVPHLPVNRAYSVNGALRSPNMDISSSPNIRLRRHSSQIEGVRQMHNNAPRSQMATERDLMAWSRRVVVNELNNGVSRVQEECRTAKGDIEISLYTVEKKKKPSYTTQRNDYEPSCGRSLRRTQRKRQHTYQTRSNIEHNSQASCQNSGVQEDSDSSSEEDETVGTSDASVEDPVVEWQSESSSSDSSSEYSDWTADAGINLQPPKRQTRQTTRKICSSSDEENLKSLEERQKKPKQTRKKKGGLVSIAGEPNEEWFAPQWILDTIPRRSPFVPQMGDELIYFRQGHEAYVRAVRKSKIYSVNLQKQPWNKMDLREQEFVKIVGIKYEVGPPTLCCLKLAFLDPISGKMTGESFSIKYHDMPDVIDFLVLHQFYNEAKERNWQIGDRFRSIIDDAWWFGTVESQQPFQPEYPDSSFQCYSVHWDNNEREKMSPWDMEPIPEGTAFPDEVGAGVPVSQEELTALLYKPQEGEWGAHSRDEECERVIQGINHLLSLDFASPFAVPVDLSAYPLYCTVVAYPTDLNTIRRRLENRFYRRISALMWEVRYIEHNARTFNEPDSPIVKAAKIVTDVLLRFIGDQSCTDILDTYNKIKAEERNSTDAEEDTEIVDLDSDGPGTSSGRKVKCRGRRQSLKCNPDAWKKQCKELLSLIYEREDSEPFRQPADLLSYPGHQEQEGESSESVVPERQQDSSLSEDYQDVIDTPVDFSTVKETLEAGNYGSPLEFYKDVRQIFNNSKAYTSNKKSRIYSMMLRLSALFESHIKNIISEYKSAIQSQKRRRPRYRKRLRSSSSSLSSSGAPSPKGKQKQMKLQPKNDQNTSVSHARTSSPFSSPVSDAAEGLSLYLLDDEPDGPFSSSSFGGYSRSGNSHDPGKAKSFRNRVLPVKQDHSLDGPLTNGDGREPRTGIKRKLLSASEEDENMGGEDKEKKETKEKSHLSTSESGELGSSLSSESTCGSDSDSESTSRTDQDYVDGDHDYSKFIQTRPKRKLRKQHGNGKRNWKTRGTGGRGRWGRWGRWSRGGRGRGGRGRGSRGRGGGGTRGRGRGRGGRGASRGATRAKRARIADDEFDTMFSGRFSRLPRIKTRNQGRRTVLYNDDSDNDNFVSTEDPLNLGTSRSGRVRKMTEKARVSHLMGWNY

SEQ ID NO: 29583 - protein, 10 aa, Artificial Sequence
  Synthetic polypeptide
KNFSGKQFGI

SEQ ID NO: 29584 - protein, 16 aa, Artificial Sequence
  Synthetic polypeptide
IIKKTFQGNNLAFKIC

SEQ ID NO: 29585 - protein, 113 aa, Artificial Sequence
  Synthetic polypeptide
SSACRKPIVEPCDHIKKKQQDVLGFLEANKIGFEEKDIAANEENRKWMRENVPENSRPATGYPLPPQIFNESQYRGDYDAFFEARENNAVYAFLGLTAPPGSKEAEVQAKQQA

SEQ ID NO: 29586 - protein, 68 aa, Artificial Sequence
  Synthetic polypeptide
KNVKKRDRPSLPLYMFLPCWTLPAFERRTSSSSVLGLGLALLDPQLAESLLWNLVIILRRNNKMCLVS

SEQ ID NO: 29587 - protein, 2 aa, Artificial Sequence
  Synthetic polypeptide
SY

SEQ ID NO: 29588 - protein, 164 aa, Artificial Sequence
  Synthetic polypeptide
ENLFEGIIEENFPGLARDLDIQLQEAQRTARKFVTKRSSPRHMVIRLHKIKTKERILRAVRQKHQIKKKQQDVLGFLEANKIGFEEKDIAANEENRKWMRENVPENSRPATGYPLPPQIFNESQYRGDYDAFFEARENNAVYAFLGLTAPPGSKEAEVQAKQQA

SEQ ID NO: 29589 - protein, 16 aa, Artificial Sequence
  Synthetic polypeptide
GKSIRLRRNNKMCLVS

SEQ ID NO: 29590 - protein, 17 aa, Artificial Sequence
  Synthetic polypeptide
NQDKGKNLKSCEAKASD

SEQ ID NO: 29591 - protein, 107 aa, Artificial Sequence
  Synthetic polypeptide
DVNNSRNWIKKKQQDVLGFLEANKIGFEEKDIAANEENRKWMRENVPENSRPATGYPLPPQIFNESQYRGDYDAFFEARENNAVYAFLGLTAPPGSKEAEVQAKQQA

SEQ ID NO: 29592 - protein, 21 aa, Artificial Sequence
  Synthetic polypeptide
GKMLTTAETGLRRNNKMCLVS

SEQ ID NO: 29593 - protein, 6 aa, Artificial Sequence
  Synthetic polypeptide
QQQKLD

SEQ ID NO: 29594 - protein, 12 aa, Artificial Sequence
  Synthetic polypeptide
GQEAEVQAKQQA

SEQ ID NO: 29595 - protein, 12 aa, Artificial Sequence
  Synthetic polypeptide
ARKQKCKQSSKH

SEQ ID NO: 29596 - protein, 12 aa, Artificial Sequence
  Synthetic polypeptide
PGSRSASKAASM

SEQ ID NO: 29597 - protein, 9 aa, Artificial Sequence
  Synthetic polypeptide
RLLHLESFL

SEQ ID NO: 29598 - protein, 9 aa, Artificial Sequence
  Synthetic polypeptide
TLMNLVQVL

SEQ ID NO: 29599 - protein, 9 aa, Artificial Sequence
  Synthetic polypeptide
ILHSLVTGV

SEQ ID NO: 29600 - protein, 9 aa, Artificial Sequence
  Synthetic polypeptide
FMMEQVGLA

SEQ ID NO: 29601 - protein, 9 aa, Artificial Sequence
  Synthetic polypeptide
AMDGKELSL

SEQ ID NO: 29602 - protein, 9 aa, Artificial Sequence
  Synthetic polypeptide
TLAYGKYYI

SEQ ID NO: 29603 - protein, 9 aa, Artificial Sequence
  Synthetic polypeptide
GLIQLIWLA

SEQ ID NO: 29604 - protein, 9 aa, Artificial Sequence
  Synthetic polypeptide
GMVDGGSNI

SEQ ID NO: 29605 - protein, 9 aa, Artificial Sequence
  Synthetic polypeptide
YLWTTFFPL

SEQ ID NO: 29606 - protein, 9 aa, Artificial Sequence
  Synthetic polypeptide
ALWEAKMII

SEQ ID NO: 29607 - protein, 9 aa, Artificial Sequence
  Synthetic polypeptide
WLSSRVTQL

SEQ ID NO: 29608 - protein, 9 aa, Artificial Sequence
  Synthetic polypeptide
AILPKANTV

SEQ ID NO: 29609 - protein, 9 aa, Artificial Sequence
  Synthetic polypeptide
VLLFEVELV

SEQ ID NO: 29610 - protein, 9 aa, Artificial Sequence
  Synthetic polypeptide
GLDTGLQGM

SEQ ID NO: 29611 - protein, 9 aa, Artificial Sequence
  Synthetic polypeptide
SLLDGTQLF

SEQ ID NO: 29612 - protein, 9 aa, Artificial Sequence
  Synthetic polypeptide
GLPTGYLFV

SEQ ID NO: 29613 - protein, 9 aa, Artificial Sequence
  Synthetic polypeptide
LLDRFGYHV

SEQ ID NO: 29614 - protein, 9 aa, Artificial Sequence
  Synthetic polypeptide
SLLEETQAI

SEQ ID NO: 29615 - protein, 9 aa, Artificial Sequence
  Synthetic polypeptide
MLLVQPAEL

SEQ ID NO: 29616 - protein, 9 aa, Artificial Sequence
  Synthetic polypeptide
GLLNISHTA

SEQ ID NO: 29617 - protein, 9 aa, Artificial Sequence
  Synthetic polypeptide
HLYEPWFPV

SEQ ID NO: 29618 - protein, 9 aa, Artificial Sequence
  Synthetic polypeptide
YLQGLPLPL

SEQ ID NO: 29619 - protein, 9 aa, Artificial Sequence
  Synthetic polypeptide
KAVEGILAV

SEQ ID NO: 29620 - protein, 9 aa, Artificial Sequence
  Synthetic polypeptide
MIYEENNRL

SEQ ID NO: 29621 - protein, 9 aa, Artificial Sequence
  Synthetic polypeptide
YLPYFLKSL

SEQ ID NO: 29622 - protein, 9 aa, Artificial Sequence
  Synthetic polypeptide
GLYSLSSVV

SEQ ID NO: 29623 - protein, 9 aa, Artificial Sequence
  Synthetic polypeptide
LMISRTPEV

SEQ ID NO: 29624 - protein, 9 aa, Artificial Sequence
  Synthetic polypeptide
LLGGPSVFL

SEQ ID NO: 29625 - protein, 9 aa, Artificial Sequence
  Synthetic polypeptide
ILSGYGPCV

SEQ ID NO: 29626 - protein, 9 aa, Artificial Sequence
  Synthetic polypeptide
FLPDLDRPL

SEQ ID NO: 29627 - protein, 9 aa, Artificial Sequence
  Synthetic polypeptide
AMDGKELSL

SEQ ID NO: 29628 - protein, 9 aa, Artificial Sequence
  Synthetic polypeptide
RMDFEDLGL

SEQ ID NO: 29629 - protein, 9 aa, Artificial Sequence
  Synthetic polypeptide
TLIFNPTEI

SEQ ID NO: 29630 - protein, 9 aa, Artificial Sequence
  Synthetic polypeptide
LLPGLLLLL

SEQ ID NO: 29631 - protein, 9 aa, Artificial Sequence
  Synthetic polypeptide
LLLVHQHAV

SEQ ID NO: 29632 - protein, 9 aa, Artificial Sequence
  Synthetic polypeptide
FLDDAPPGT

SEQ ID NO: 29633 - protein, 9 aa, Artificial Sequence
  Synthetic polypeptide
VLIRYVWTL

SEQ ID NO: 29634 - protein, 9 aa, Artificial Sequence
  Synthetic polypeptide
YLCGHLHTL

SEQ ID NO: 29635 - protein, 9 aa, Artificial Sequence
  Synthetic polypeptide
VLSQLTILI

SEQ ID NO: 29636 - protein, 9 aa, Artificial Sequence
  Synthetic polypeptide
TLGGLMPVL

SEQ ID NO: 29637 - protein, 9 aa, Artificial Sequence
  Synthetic polypeptide
FLQGSITFI

SEQ ID NO: 29638 - protein, 9 aa, Artificial Sequence
  Synthetic polypeptide
MLLLYIWQV

SEQ ID NO: 29639 - protein, 9 aa, Artificial Sequence
  Synthetic polypeptide
YLKIMPVHL

SEQ ID NO: 29640 - protein, 9 aa, Artificial Sequence
  Synthetic polypeptide
HTLGGLMPV

SEQ ID NO: 29641 - protein, 9 aa, Artificial Sequence
  Synthetic polypeptide
YIMARVLFV

SEQ ID NO: 29642 - protein, 9 aa, Artificial Sequence
  Synthetic polypeptide
FILRTDHYI

SEQ ID NO: 29643 - protein, 9 aa, Artificial Sequence
  Synthetic polypeptide
IMSSAIAYL

SEQ ID NO: 29644 - protein, 9 aa, Artificial Sequence
  Synthetic polypeptide
FIIGILQLA

SEQ ID NO: 29645 - protein, 9 aa, Artificial Sequence
  Synthetic polypeptide
YLLQEIYGI

SEQ ID NO: 29646 - protein, 9 aa, Artificial Sequence
  Synthetic polypeptide
GVFPVVIQA

SEQ ID NO: 29647 - protein, 9 aa, Artificial Sequence
  Synthetic polypeptide
ALVHLPSQL

SEQ ID NO: 29648 - protein, 9 aa, Artificial Sequence
  Synthetic polypeptide
GLHPAKPQV

SEQ ID NO: 29649 - protein, 9 aa, Artificial Sequence
  Synthetic polypeptide
MLVTWELAL

SEQ ID NO: 29650 - protein, 9 aa, Artificial Sequence
  Synthetic polypeptide
VLLTNTIWL

SEQ ID NO: 29651 - protein, 9 aa, Artificial Sequence
  Synthetic polypeptide
ALVHLPSQL

SEQ ID NO: 29652 - protein, 9 aa, Artificial Sequence
  Synthetic polypeptide
CLIDEMPEA

SEQ ID NO: 29653 - protein, 9 aa, Artificial Sequence
  Synthetic polypeptide
ALMGGFMKT

SEQ ID NO: 29654 - protein, 9 aa, Artificial Sequence
  Synthetic polypeptide
  misc_feature (8)..(8): Xaa can be any naturally occurring amino acid
LLLHLPLXL

SEQ ID NO: 29655 - protein, 9 aa, Artificial Sequence
  Synthetic polypeptide
TLQDKNLGL

SEQ ID NO: 29656 - protein, 9 aa, Artificial Sequence
  Synthetic polypeptide
ILANLPPAL

SEQ ID NO: 29657 - protein, 9 aa, Artificial Sequence
  Synthetic polypeptide
PLWDGMAGL

SEQ ID NO: 29658 - protein, 9 aa, Artificial Sequence
  Synthetic polypeptide
GLDHQTHPL

SEQ ID NO: 29659 - protein, 9 aa, Artificial Sequence
  Synthetic polypeptide
GMFLLPPQL

SEQ ID NO: 29660 - protein, 9 aa, Artificial Sequence
  Synthetic polypeptide
RLADHLSFC

SEQ ID NO: 29661 - protein, 9 aa, Artificial Sequence
  Synthetic polypeptide
RMRDQLPAL

SEQ ID NO: 29662 - protein, 9 aa, Artificial Sequence
  Synthetic polypeptide
GLLHAEVAL

SEQ ID NO: 29663 - protein, 9 aa, Artificial Sequence
  Synthetic polypeptide
SLQNCQVSV

SEQ ID NO: 29664 - protein, 9 aa, Artificial Sequence
  Synthetic polypeptide
VISAFPSEV

SEQ ID NO: 29665 - protein, 9 aa, Artificial Sequence
  Synthetic polypeptide
ALAIAALEL

SEQ ID NO: 29666 - protein, 9 aa, Artificial Sequence
  Synthetic polypeptide
VLDGLDVLL

SEQ ID NO: 29667 - protein, 9 aa, Artificial Sequence
  Synthetic polypeptide
ELFPPLFMA

SEQ ID NO: 29668 - protein, 9 aa, Artificial Sequence
  Synthetic polypeptide
FLIVAEILI

SEQ ID NO: 29669 - protein, 9 aa, Artificial Sequence
  Synthetic polypeptide
IVAEILISL

SEQ ID NO: 29670 - protein, 9 aa, Artificial Sequence
  Synthetic polypeptide
KAVEGILAV

SEQ ID NO: 29671 - protein, 9 aa, Artificial Sequence
  Synthetic polypeptide
YLPHLPQVL

SEQ ID NO: 29672 - protein, 9 aa, Artificial Sequence
  Synthetic polypeptide
MLLDPMGGI

SEQ ID NO: 29673 - protein, 9 aa, Artificial Sequence
  Synthetic polypeptide
RLLHLESFL

SEQ ID NO: 29674 - protein, 9 aa, Artificial Sequence
  Synthetic polypeptide
YLAYILYFV

SEQ ID NO: 29675 - protein, 9 aa, Artificial Sequence
  Synthetic polypeptide
LMTSSIMSV

SEQ ID NO: 29676 - protein, 9 aa, Artificial Sequence
  Synthetic polypeptide
MLMKTVWQA

SEQ ID NO: 29677 - protein, 9 aa, Artificial Sequence
  Synthetic polypeptide
SLQPEDMAL

SEQ ID NO: 29678 - protein, 9 aa, Artificial Sequence
  Synthetic polypeptide
KILTYFPMV

SEQ ID NO: 29679 - protein, 9 aa, Artificial Sequence
  Synthetic polypeptide
FLGTRVTRV

SEQ ID NO: 29680 - protein, 9 aa, Artificial Sequence
  Synthetic polypeptide
SLMQSGSPV

SEQ ID NO: 29681 - protein, 9 aa, Artificial Sequence
  Synthetic polypeptide
VLMWTMAHL

SEQ ID NO: 29682 - protein, 9 aa, Artificial Sequence
  Synthetic polypeptide
LLGETKVYV

SEQ ID NO: 29683 - protein, 9 aa, Artificial Sequence
  Synthetic polypeptide
KILTYFPMV

SEQ ID NO: 29684 - protein, 9 aa, Artificial Sequence
  Synthetic polypeptide
SLLERGLEA

SEQ ID NO: 29685 - protein, 9 aa, Artificial Sequence
  Synthetic polypeptide
VLSSLNVPL

SEQ ID NO: 29686 - protein, 9 aa, Artificial Sequence
  Synthetic polypeptide
FLERKSIRV

SEQ ID NO: 29687 - protein, 9 aa, Artificial Sequence
  Synthetic polypeptide
FVGSSTFYL

SEQ ID NO: 29688 - protein, 9 aa, Artificial Sequence
  Synthetic polypeptide
FLYTGDFFL

SEQ ID NO: 29689 - protein, 9 aa, Artificial Sequence
  Synthetic polypeptide
SVGPFALTV

SEQ ID NO: 29690 - protein, 9 aa, Artificial Sequence
  Synthetic polypeptide
NLALPLPKV

SEQ ID NO: 29691 - protein, 9 aa, Artificial Sequence
  Synthetic polypeptide
VLESGLYQV

SEQ ID NO: 29692 - protein, 9 aa, Artificial Sequence
  Synthetic polypeptide
MLVAITVLI

SEQ ID NO: 29693 - protein, 9 aa, Artificial Sequence
  Synthetic polypeptide
FMDDAKILF

SEQ ID NO: 29694 - protein, 9 aa, Artificial Sequence
  Synthetic polypeptide
ALVHLPSQL

SEQ ID NO: 29695 - protein, 9 aa, Artificial Sequence
  Synthetic polypeptide
ILTASITSI

SEQ ID NO: 29696 - protein, 9 aa, Artificial Sequence
  Synthetic polypeptide
AMDGKELSL

SEQ ID NO: 29697 - protein, 9 aa, Artificial Sequence
  Synthetic polypeptide
SLGWNISGV

SEQ ID NO: 29698 - protein, 9 aa, Artificial Sequence
  Synthetic polypeptide
MISAFPNEV

SEQ ID NO: 29699 - protein, 9 aa, Artificial Sequence
  Synthetic polypeptide
RLTHELPGI

SEQ ID NO: 29700 - protein, 9 aa, Artificial Sequence
  Synthetic polypeptide
LLFSDGEKV

SEQ ID NO: 29701 - protein, 9 aa, Artificial Sequence
  Synthetic polypeptide
RLNESTTFV

SEQ ID NO: 29702 - protein, 9 aa, Artificial Sequence
  Synthetic polypeptide
KLEELKSFV

SEQ ID NO: 29703 - protein, 9 aa, Artificial Sequence
  Synthetic polypeptide
SINEEIQTV

SEQ ID NO: 29704 - protein, 9 aa, Artificial Sequence
  Synthetic polypeptide
RLHDGPLRA

SEQ ID NO: 29705 - protein, 9 aa, Artificial Sequence
  Synthetic polypeptide
MISAFPNEV

SEQ ID NO: 29706 - protein, 9 aa, Artificial Sequence
  Synthetic polypeptide
ILHTSVPFL

SEQ ID NO: 29707 - protein, 9 aa, Artificial Sequence
  Synthetic polypeptide
YLENMVSGV

SEQ ID NO: 29708 - protein, 9 aa, Artificial Sequence
  Synthetic polypeptide
QLLGRLESL

SEQ ID NO: 29709 - protein, 9 aa, Artificial Sequence
  Synthetic polypeptide
RLLHLESFL

SEQ ID NO: 29710 - protein, 9 aa, Artificial Sequence
  Synthetic polypeptide
ALLRQMEGI

SEQ ID NO: 29711 - protein, 9 aa, Artificial Sequence
  Synthetic polypeptide
TLNKDFQEV

SEQ ID NO: 29712 - protein, 9 aa, Artificial Sequence
  Synthetic polypeptide
IMEQGDLSV

SEQ ID NO: 29713 - protein, 9 aa, Artificial Sequence
  Synthetic polypeptide
RLLHLESFL

SEQ ID NO: 29714 - protein, 9 aa, Artificial Sequence
  Synthetic polypeptide
RQAPGFHHA

SEQ ID NO: 29715 - protein, 9 aa, Artificial Sequence
  Synthetic polypeptide
GLPSHVELA

SEQ ID NO: 29716 - protein, 9 aa, Artificial Sequence
  Synthetic polypeptide
LLTSWHLYL

SEQ ID NO: 29717 - protein, 9 aa, Artificial Sequence
  Synthetic polypeptide
ILPKANTVV

SEQ ID NO: 29718 - protein, 9 aa, Artificial Sequence
  Synthetic polypeptide
ELLGQTPCV

SEQ ID NO: 29719 - protein, 9 aa, Artificial Sequence
  Synthetic polypeptide
LLTSWHLYL

SEQ ID NO: 29720 - protein, 10 aa, Artificial Sequence
  Synthetic polypeptide
ALLSMTDPLK

SEQ ID NO: 29721 - protein, 10 aa, Artificial Sequence
  Synthetic polypeptide
AVMTEVVLSK

SEQ ID NO: 29722 - protein, 9 aa, Artificial Sequence
  Synthetic polypeptide
DIFQQQISR

SEQ ID NO: 29723 - protein, 8 aa, Artificial Sequence
  Synthetic polypeptide
DLLQNNTR

SEQ ID NO: 29724 - protein, 10 aa, Artificial Sequence
  Synthetic polypeptide
GAALLDLHAL

SEQ ID NO: 29725 - protein, 10 aa, Artificial Sequence
  Synthetic polypeptide
GGGYNDFGNY

SEQ ID NO: 29726 - protein, 12 aa, Artificial Sequence
  Synthetic polypeptide
GSGKRTSSQLKP

SEQ ID NO: 29727 - protein, 9 aa, Artificial Sequence
  Synthetic polypeptide
ILQLTTVNR

SEQ ID NO: 29728 - protein, 10 aa, Artificial Sequence
  Synthetic polypeptide
ITSWFVPRPW

SEQ ID NO: 29729 - protein, 10 aa, Artificial Sequence
  Synthetic polypeptide
MRATKPTVQK

SEQ ID NO: 29730 - protein, 9 aa, Artificial Sequence
  Synthetic polypeptide
NELDKFIVF

SEQ ID NO: 29731 - protein, 12 aa, Artificial Sequence
  Synthetic polypeptide
NPQFLISMILQR

SEQ ID NO: 29732 - protein, 9 aa, Artificial Sequence
  Synthetic polypeptide
QISGVPSRF

SEQ ID NO: 29733 - protein, 9 aa, Artificial Sequence
  Synthetic polypeptide
RATKPTVQK

SEQ ID NO: 29734 - protein, 9 aa, Artificial Sequence
  Synthetic polypeptide
RLNTNMKYK

SEQ ID NO: 29735 - protein, 9 aa, Artificial Sequence
  Synthetic polypeptide
RRQQLITRF

SEQ ID NO: 29736 - protein, 9 aa, Artificial Sequence
  Synthetic polypeptide
RTQPSWKEK

SEQ ID NO: 29737 - protein, 9 aa, Artificial Sequence
  Synthetic polypeptide
SAAAGIVGR

SEQ ID NO: 29738 - protein, 8 aa, Artificial Sequence
  Synthetic polypeptide
SGFTFRSY

SEQ ID NO: 29739 - protein, 9 aa, Artificial Sequence
  Synthetic polypeptide
TEATVDTSF

SEQ ID NO: 29740 - protein, 9 aa, Artificial Sequence
  Synthetic polypeptide
TLISKAGIL

SEQ ID NO: 29741 - protein, 9 aa, Artificial Sequence
  Synthetic polypeptide
TVVQLQENR

SEQ ID NO: 29742 - protein, 10 aa, Artificial Sequence
  Synthetic polypeptide
VWMRSPLSTF

SEQ ID NO: 29743 - protein, 9 aa, Artificial Sequence
  Synthetic polypeptide
SLASVQRFL

SEQ ID NO: 29744 - protein, 9 aa, Artificial Sequence
  Synthetic polypeptide
YLQGELQQC

SEQ ID NO: 29745 - protein, 13 aa, Artificial Sequence
  Synthetic polypeptide
CAVLLDNTDKLIF

SEQ ID NO: 29746 - protein, 14 aa, Artificial Sequence
  Synthetic polypeptide
CAVNTRGTASKLTF

SEQ ID NO: 29747 - protein, 11 aa, Artificial Sequence
  Synthetic polypeptide
CAVFTGNQFYF

SEQ ID NO: 29748 - protein, 13 aa, Artificial Sequence
  Synthetic polypeptide
CAGQLAGAQKLVF

SEQ ID NO: 29749 - protein, 14 aa, Artificial Sequence
  Synthetic polypeptide
CASSRLQGALELFF

SEQ ID NO: 29750 - protein, 14 aa, Artificial Sequence
  Synthetic polypeptide
CASSLGGGTDTQYF

SEQ ID NO: 29751 - protein, 13 aa, Artificial Sequence
  Synthetic polypeptide
CASLSGESYEQYF

SEQ ID NO: 29752 - protein, 15 aa, Artificial Sequence
  Synthetic polypeptide
CASSPSRDGQETQYF

SEQ ID NO: 29753 - protein, 9 aa, Artificial Sequence
  Synthetic polypeptide
SSTGPADLK

SEQ ID NO: 29754 - protein, 8 aa, Artificial Sequence
  Synthetic polypeptide
MLLGLLAK

SEQ ID NO: 29755 - protein, 7 aa, Artificial Sequence
  Synthetic polypeptide
MGISIVK

SEQ ID NO: 29756 - protein, 14 aa, Artificial Sequence
  Synthetic polypeptide
IQSFTNISFSMPHR

SEQ ID NO: 29757 - protein, 10 aa, Artificial Sequence
  Synthetic polypeptide
TQEVEVAVNR

SEQ ID NO: 29758 - protein, 9 aa, Artificial Sequence
  Synthetic polypeptide
MASASPTIK

SEQ ID NO: 29759 - protein, 16 aa, Artificial Sequence
  Synthetic polypeptide
ETDLITVTGSSFLTHR

SEQ ID NO: 29760 - protein, 10 aa, Artificial Sequence
  Synthetic polypeptide
EAENEVQTAK

SEQ ID NO: 29761 - protein, 23 aa, Artificial Sequence
  Synthetic polypeptide
LNIHLLMVTSSVTSSSILINLDR

SEQ ID NO: 29762 - protein, 22 aa, Artificial Sequence
  Synthetic polypeptide
DLELEIPFGPAIPLLGSCSQCR

SEQ ID NO: 29763 - protein, 16 aa, Artificial Sequence
  Synthetic polypeptide
MILESTYHNTLHIAMK

SEQ ID NO: 29764 - protein, 16 aa, Artificial Sequence
  Synthetic polypeptide
MLAPENSDIGLAAWGR

SEQ ID NO: 29765 - protein, 13 aa, Artificial Sequence
  Synthetic polypeptide
TQEAELAGVATVR

SEQ ID NO: 29766 - protein, 13 aa, Artificial Sequence
  Synthetic polypeptide
TSLHSIPVTVGRR

SEQ ID NO: 29767 - protein, 13 aa, Artificial Sequence
  Synthetic polypeptide
AEIAPLHSSLGDK

SEQ ID NO: 29768 - protein, 15 aa, Artificial Sequence
  Synthetic polypeptide
MLGAVAHNCDPSTLR

SEQ ID NO: 29769 - protein, 10 aa, Artificial Sequence
  Synthetic polypeptide
GPAPEPPSMR

SEQ ID NO: 29770 - protein, 12 aa, Artificial Sequence
  Synthetic polypeptide
MACNMGLEKGEK

SEQ ID NO: 29771 - protein, 9 aa, Artificial Sequence
  Synthetic polypeptide
MASICPFLK

SEQ ID NO: 29772 - protein, 12 aa, Artificial Sequence
  Synthetic polypeptide
EIETILANPENK

SEQ ID NO: 29773 - protein, 19 aa, Artificial Sequence
  Synthetic polypeptide
QAQCSTDSTLWYFMHGVCR

SEQ ID NO: 29774 - protein, 15 aa, Artificial Sequence
  Synthetic polypeptide
LASTTSVSEEDVSSR

SEQ ID NO: 29775 - protein, 10 aa, Artificial Sequence
  Synthetic polypeptide
AIAQGIQELR

SEQ ID NO: 29776 - protein, 12 aa, Artificial Sequence
  Synthetic polypeptide
TCPSAMIVSFLK

SEQ ID NO: 29777 - protein, 16 aa, Artificial Sequence
  Synthetic polypeptide
VQLAGNTLPSTPCWTR

SEQ ID NO: 29778 - protein, 24 aa, Artificial Sequence
  Synthetic polypeptide
GLEFETSLANVVQLPNSIVFSVTR

SEQ ID NO: 29779 - protein, 11 aa, Artificial Sequence
  Synthetic polypeptide
KESLEASMMLK

SEQ ID NO: 29780 - protein, 13 aa, Artificial Sequence
  Synthetic polypeptide
VETLCATLWGFGK

SEQ ID NO: 29781 - protein, 13 aa, Artificial Sequence
  Synthetic polypeptide
MMAHLCIFGLQSR

SEQ ID NO: 29782 - protein, 12 aa, Artificial Sequence
  Synthetic polypeptide
VSTSHVGPWVSP

SEQ ID NO: 29783 - protein, 16 aa, Artificial Sequence
  Synthetic polypeptide
NLLDIDAPVTGWQELK

SEQ ID NO: 29784 - protein, 14 aa, Artificial Sequence
  Synthetic polypeptide
AKIAPAEGPDVSER

SEQ ID NO: 29785 - protein, 16 aa, Artificial Sequence
  Synthetic polypeptide
EAEEPSDNGPLFTELK

SEQ ID NO: 29786 - protein, 10 aa, Artificial Sequence
  Synthetic polypeptide
MAGLVFQWLR

SEQ ID NO: 29787 - protein, 14 aa, Artificial Sequence
  Synthetic polypeptide
ISQLQIWDTAGQER

SEQ ID NO: 29788 - protein, 15 aa, Artificial Sequence
  Synthetic polypeptide
VISAFPSELQSQCTK

SEQ ID NO: 29789 - protein, 14 aa, Artificial Sequence
  Synthetic polypeptide
TAQLPEQLMTWHSR

SEQ ID NO: 29790 - protein, 15 aa, Artificial Sequence
  Synthetic polypeptide
LLNITAGLGSDGTIR

SEQ ID NO: 29791 - protein, 16 aa, Artificial Sequence
  Synthetic polypeptide
MGTVAHAYNPSTLGGR

SEQ ID NO: 29792 - protein, 17 aa, Artificial Sequence
  Synthetic polypeptide
MLPPFVLAVTMGLSVVK

SEQ ID NO: 29793 - protein, 19 aa, Artificial Sequence
  Synthetic polypeptide
QADHLMPGVQDQPNMTSVP

SEQ ID NO: 29794 - protein, 13 aa, Artificial Sequence
  Synthetic polypeptide
WAGHSASCSSLRK

SEQ ID NO: 29795 - protein, 16 aa, Artificial Sequence
  Synthetic polypeptide
TFMMIHCHLMNNMSCR

SEQ ID NO: 29796 - protein, 18 aa, Artificial Sequence
  Synthetic polypeptide
GQIGILLWNSMGTMQQPR

SEQ ID NO: 29797 - protein, 12 aa, Artificial Sequence
  Synthetic polypeptide
APTDSTLCTLCK

SEQ ID NO: 29798 - protein, 13 aa, Artificial Sequence
  Synthetic polypeptide
LREPIDNLTPEER

SEQ ID NO: 29799 - protein, 22 aa, Artificial Sequence
  Synthetic polypeptide
EWSGIQKATLMDLQLSDSNFRR

SEQ ID NO: 29800 - protein, 13 aa, Artificial Sequence
  Synthetic polypeptide
TSLANMVVFPLMK

SEQ ID NO: 29801 - protein, 17 aa, Artificial Sequence
  Synthetic polypeptide
IWLTEDATALLQRPGWR

SEQ ID NO: 29802 - protein, 20 aa, Artificial Sequence
  Synthetic polypeptide
METGIISLLPPWGGRPSAVR

SEQ ID NO: 29803 - protein, 11 aa, Artificial Sequence
  Synthetic polypeptide
GNLLIISLDAK

SEQ ID NO: 29804 - protein, 15 aa, Artificial Sequence
  Synthetic polypeptide
TSSGLPLILHCVYAK

SEQ ID NO: 29805 - protein, 17 aa, Artificial Sequence
  Synthetic polypeptide
SGVQDQPGQQGPVTLHK

SEQ ID NO: 29806 - protein, 10 aa, Artificial Sequence
  Synthetic polypeptide
WADHLTSGVR

SEQ ID NO: 29807 - protein, 21 aa, Artificial Sequence
  Synthetic polypeptide
MNDSCIFRPETDSDIMELTDR

SEQ ID NO: 29808 - protein, 7 aa, Artificial Sequence
  Synthetic polypeptide
IVEQTLK

SEQ ID NO: 29809 - protein, 10 aa, Artificial Sequence
  Synthetic polypeptide
MELTIPGEGK

SEQ ID NO: 29810 - protein, 9 aa, Artificial Sequence
  Synthetic polypeptide
HFIAMMYFK

SEQ ID NO: 29811 - protein, 13 aa, Artificial Sequence
  Synthetic polypeptide
ETFFLQQQGNDAK

SEQ ID NO: 29812 - protein, 20 aa, Artificial Sequence
  Synthetic polypeptide
QLQVCVLQIMGSCVPSCPTP

SEQ ID NO: 29813 - protein, 16 aa, Artificial Sequence
  Synthetic polypeptide
EAEASQAAQEAEINAR

SEQ ID NO: 29814 - protein, 13 aa, Artificial Sequence
  Synthetic polypeptide
YSNVLEMAWLQYA

SEQ ID NO: 29815 - protein, 28 aa, Artificial Sequence
  Synthetic polypeptide
MATVAHTSLATVEDFQIRPHTLYVHSYK

SEQ ID NO: 29816 - protein, 16 aa, Artificial Sequence
  Synthetic polypeptide
LPIFFFGTHETLLGGR

SEQ ID NO: 29817 - protein, 19 aa, Artificial Sequence
  Synthetic polypeptide
QASRALPPCPWNTQTSGSR

SEQ ID NO: 29818 - protein, 12 aa, Artificial Sequence
  Synthetic polypeptide
LDIGFPSLQNYR

SEQ ID NO: 29819 - protein, 9 aa, Artificial Sequence
  Synthetic polypeptide
TLPSLDDLR

SEQ ID NO: 29820 - protein, 11 aa, Artificial Sequence
  Synthetic polypeptide
LLVNDPETAVK

SEQ ID NO: 29821 - protein, 12 aa, Artificial Sequence
  Synthetic polypeptide
LQEMGPLGVPQR

SEQ ID NO: 29822 - protein, 10 aa, Artificial Sequence
  Synthetic polypeptide
TSLANMDMFK

SEQ ID NO: 29823 - protein, 16 aa, Artificial Sequence
  Synthetic polypeptide
MGAVVHACKPSTLGGR

SEQ ID NO: 29824 - protein, 14 aa, Artificial Sequence
  Synthetic polypeptide
KQAQKDCPTHSGVS

SEQ ID NO: 29825 - protein, 12 aa, Artificial Sequence
  Synthetic polypeptide
SEGIRIMEMLLK

SEQ ID NO: 29826 - protein, 12 aa, Artificial Sequence
  Synthetic polypeptide
GFGPSTMLGTQK

SEQ ID NO: 29827 - protein, 9 aa, Artificial Sequence
  Synthetic polypeptide
MTKLLSPIR

SEQ ID NO: 29828 - protein, 14 aa, Artificial Sequence
  Synthetic polypeptide
WLTPVIPALWEAER

SEQ ID NO: 29829 - protein, 7 aa, Artificial Sequence
  Synthetic polypeptide
ETTLAFK

SEQ ID NO: 29830 - protein, 8 aa, Artificial Sequence
  Synthetic polypeptide
ATALQPGR

SEQ ID NO: 29831 - protein, 13 aa, Artificial Sequence
  Synthetic polypeptide
ITSVVMVDEAHER

SEQ ID NO: 29832 - protein, 13 aa, Artificial Sequence
  Synthetic polypeptide
SQYCTPALEAETK

SEQ ID NO: 29833 - protein, 11 aa, Artificial Sequence
  Synthetic polypeptide
TLTFLGPLQFR

SEQ ID NO: 29834 - protein, 12 aa, Artificial Sequence
  Synthetic polypeptide
TPEVEATVPLQK

SEQ ID NO: 29835 - protein, 12 aa, Artificial Sequence
  Synthetic polypeptide
VILIFFPECYAK

SEQ ID NO: 29836 - protein, 21 aa, Artificial Sequence
  Synthetic polypeptide
DGDHPSQHDGVLLCCPGWSTM

SEQ ID NO: 29837 - protein, 14 aa, Artificial Sequence
  Synthetic polypeptide
GGSHLQSQHFGRPR

SEQ ID NO: 29838 - protein, 11 aa, Artificial Sequence
  Synthetic polypeptide
SVSTIFLTCSR

SEQ ID NO: 29839 - protein, 15 aa, Artificial Sequence
  Synthetic polypeptide
MGTVAHACNPCTLGG

SEQ ID NO: 29840 - protein, 14 aa, Artificial Sequence
  Synthetic polypeptide
TPGRNGHLESGHLK

SEQ ID NO: 29841 - protein, 12 aa, Artificial Sequence
  Synthetic polypeptide
SGFSFLLGIVGF

SEQ ID NO: 29842 - protein, 18 aa, Artificial Sequence
  Synthetic polypeptide
EIETLHHPSTGVILADHK

SEQ ID NO: 29843 - protein, 17 aa, Artificial Sequence
  Synthetic polypeptide
TIAQMIDSTVALPLEAT

SEQ ID NO: 29844 - protein, 15 aa, Artificial Sequence
  Synthetic polypeptide
NQSQSHLNVGLLASR

SEQ ID NO: 29845 - protein, 16 aa, Artificial Sequence
  Synthetic polypeptide
SVERFLQEDQMFHQEK

SEQ ID NO: 29846 - protein, 19 aa, Artificial Sequence
  Synthetic polypeptide
MELTIPGVGHSSGSLNEGK

SEQ ID NO: 29847 - protein, 10 aa, Artificial Sequence
  Synthetic polypeptide
ESLEASMMLK

SEQ ID NO: 29848 - protein, 14 aa, Artificial Sequence
  Synthetic polypeptide
LLITAEDQSMWIQS

SEQ ID NO: 29849 - protein, 16 aa, Artificial Sequence
  Synthetic polypeptide
QAWWIMPIIPALWEAK

SEQ ID NO: 29850 - protein, 12 aa, Artificial Sequence
  Synthetic polypeptide
MESQMVEQLCSR

SEQ ID NO: 29851 - protein, 10 aa, Artificial Sequence
  Synthetic polypeptide
GLTGEFSITR

SEQ ID NO: 29852 - protein, 12 aa, Artificial Sequence
  Synthetic polypeptide
GGEFAPSWDCKP

SEQ ID NO: 29853 - protein, 10 aa, Artificial Sequence
  Synthetic polypeptide
CLTTLFGSFR

SEQ ID NO: 29854 - protein, 18 aa, Artificial Sequence
  Synthetic polypeptide
SQHFGRPSCVPLPATGVK

SEQ ID NO: 29855 - protein, 12 aa, Artificial Sequence
  Synthetic polypeptide
EQLSQAEAVALK

SEQ ID NO: 29856 - protein, 10 aa, Artificial Sequence
  Synthetic polypeptide
GQVLGPWPSR

SEQ ID NO: 29857 - protein, 18 aa, Artificial Sequence
  Synthetic polypeptide
TGAQPPATMPLNVSFTNR

SEQ ID NO: 29858 - protein, 10 aa, Artificial Sequence
  Synthetic polypeptide
TGIPSATLIR

SEQ ID NO: 29859 - protein, 12 aa, Artificial Sequence
  Synthetic polypeptide
EQTDVMHQNIYD

SEQ ID NO: 29860 - protein, 15 aa, Artificial Sequence
  Synthetic polypeptide
FVDVTECQACSANSR

SEQ ID NO: 29861 - protein, 10 aa, Artificial Sequence
  Synthetic polypeptide
IRDSEELIGR

SEQ ID NO: 29862 - protein, 10 aa, Artificial Sequence
  Synthetic polypeptide
DHIMFSLFEK

SEQ ID NO: 29863 - protein, 12 aa, Artificial Sequence
  Synthetic polypeptide
DSGSTTWCFIQK

SEQ ID NO: 29864 - protein, 18 aa, Artificial Sequence
  Synthetic polypeptide
GFPSHMSLGYHFQCPIPR

SEQ ID NO: 29865 - protein, 12 aa, Artificial Sequence
  Synthetic polypeptide
CPEMLPTSQTLR

SEQ ID NO: 29866 - protein, 16 aa, Artificial Sequence
  Synthetic polypeptide
FLQQCLLLLVSLEVFR

SEQ ID NO: 29867 - protein, 15 aa, Artificial Sequence
  Synthetic polypeptide
TAGGQQQALPLGSPR

SEQ ID NO: 29868 - protein, 16 aa, Artificial Sequence
  Synthetic polypeptide
SVTVSHNPQLGPSGCR

SEQ ID NO: 29869 - protein, 13 aa, Artificial Sequence
  Synthetic polypeptide
AVTANGYQMLDGK

SEQ ID NO: 29870 - protein, 13 aa, Artificial Sequence
  Synthetic polypeptide
FPSGILCVIMPGR

SEQ ID NO: 29871 - protein, 24 aa, Artificial Sequence
  Synthetic polypeptide
HDYDEDLVQEASSEDVLGVHMVDK

SEQ ID NO: 29872 - protein, 12 aa, Artificial Sequence
  Synthetic polypeptide
CNPSTLGDQAEK

SEQ ID NO: 29873 - protein, 13 aa, Artificial Sequence
  Synthetic polypeptide
AEISCQQPAPGPR

SEQ ID NO: 29874 - protein, 24 aa, Artificial Sequence
  Synthetic polypeptide
GQEMETIPANTLIQEDILDTGNDK

SEQ ID NO: 29875 - protein, 8 aa, Artificial Sequence
  Synthetic polypeptide
GGFHHDCK

SEQ ID NO: 29876 - protein, 12 aa, Artificial Sequence
  Synthetic polypeptide
LWTSLPAPMFSR

SEQ ID NO: 29877 - protein, 17 aa, Artificial Sequence
  Synthetic polypeptide
CMCLEYPAVVEFAPFQK

SEQ ID NO: 29878 - protein, 12 aa, Artificial Sequence
  Synthetic polypeptide
LIISIFLVHSPK

SEQ ID NO: 29879 - protein, 17 aa, Artificial Sequence
  Synthetic polypeptide
GATWTGSSPQGSWDFTR

SEQ ID NO: 29880 - protein, 10 aa, Artificial Sequence
  Synthetic polypeptide
TVTVPAQELK

SEQ ID NO: 29881 - protein, 11 aa, Artificial Sequence
  Synthetic polypeptide
ENTMAENELQV

SEQ ID NO: 29882 - protein, 23 aa, Artificial Sequence
  Synthetic polypeptide
TPMELELPPASHFEFIGSSANCR

SEQ ID NO: 29883 - protein, 18 aa, Artificial Sequence
  Synthetic polypeptide
GLLWSGMALTGSLRVTQR

SEQ ID NO: 29884 - protein, 21 aa, Artificial Sequence
  Synthetic polypeptide
GLSDHVQLSQSHSTSFHVSPK

SEQ ID NO: 29885 - protein, 21 aa, Artificial Sequence
  Synthetic polypeptide
MILESTYHNTLHIAMKAPELK

SEQ ID NO: 29886 - protein, 12 aa, Artificial Sequence
  Synthetic polypeptide
CPETFLDGTLGR

SEQ ID NO: 29887 - protein, 17 aa, Artificial Sequence
  Synthetic polypeptide
SYQLRPGTMIEWGNYWR

SEQ ID NO: 29888 - protein, 10 aa, Artificial Sequence
  Synthetic polypeptide
TILANTVMAR

SEQ ID NO: 29889 - protein, 10 aa, Artificial Sequence
  Synthetic polypeptide
MELTIPGVGK

SEQ ID NO: 29890 - protein, 32 aa, Artificial Sequence
  Synthetic polypeptide
SSPQAIQMVATLGTTTCCSFDNLLEVGPICNK

SEQ ID NO: 29891 - protein, 8 aa, Artificial Sequence
  Synthetic polypeptide
GDPGIDAR

SEQ ID NO: 29892 - protein, 16 aa, Artificial Sequence
  Synthetic polypeptide
MAFSGSQAPYLSPDPK

SEQ ID NO: 29893 - protein, 22 aa, Artificial Sequence
  Synthetic polypeptide
TIAQGNLSNTDVQAAKRSCSYL

SEQ ID NO: 29894 - protein, 21 aa, Artificial Sequence
  Synthetic polypeptide
MQENTLRAPTDSTLWHPPHYK

SEQ ID NO: 29895 - protein, 17 aa, Artificial Sequence
  Synthetic polypeptide
DQPGQHGPGMRPPLGLR

SEQ ID NO: 29896 - protein, 12 aa, Artificial Sequence
  Synthetic polypeptide
EAPTYITWTIRR

SEQ ID NO: 29897 - protein, 13 aa, Artificial Sequence
  Synthetic polypeptide
DLVGGYTPGTPYK

SEQ ID NO: 29898 - protein, 18 aa, Artificial Sequence
  Synthetic polypeptide
GLNEAIFMIPTNPPPTFR

SEQ ID NO: 29899 - protein, 12 aa, Artificial Sequence
  Synthetic polypeptide
DAAALLLANEAR

SEQ ID NO: 29900 - protein, 13 aa, Artificial Sequence
  Synthetic polypeptide
ATSLWYFMAAQAK

SEQ ID NO: 29901 - protein, 18 aa, Artificial Sequence
  Synthetic polypeptide
MDLVQVSGSLGSPVLSCK

SEQ ID NO: 29902 - protein, 11 aa, Artificial Sequence
  Synthetic polypeptide
QHQEVTLYGLK

SEQ ID NO: 29903 - protein, 10 aa, Artificial Sequence
  Synthetic polypeptide
LVSLSQYWEK

SEQ ID NO: 29904 - protein, 15 aa, Artificial Sequence
  Synthetic polypeptide
TGTTPVYSSQHEQHR

SEQ ID NO: 29905 - protein, 18 aa, Artificial Sequence
  Synthetic polypeptide
QATGMDLEVIILSDITQK

SEQ ID NO: 29906 - protein, 9 aa, Artificial Sequence
  Synthetic polypeptide
LLALLDVLK

SEQ ID NO: 29907 - protein, 10 aa, Artificial Sequence
  Synthetic polypeptide
GIGYPAWAMK

SEQ ID NO: 29908 - protein, 14 aa, Artificial Sequence
  Synthetic polypeptide
MESQLQIEETTLLR

SEQ ID NO: 29909 - protein, 13 aa, Artificial Sequence
  Synthetic polypeptide
GLLGLAGMRPELR

SEQ ID NO: 29910 - protein, 14 aa, Artificial Sequence
  Synthetic polypeptide
GQEMETILANMISR

SEQ ID NO: 29911 - protein, 23 aa, Artificial Sequence
  Synthetic polypeptide
ICRPGAAAAARHPGSPGGQLAPR

SEQ ID NO: 29912 - protein, 12 aa, Artificial Sequence
  Synthetic polypeptide
ELGVTAGGLPTR

SEQ ID NO: 29913 - protein, 12 aa, Artificial Sequence
  Synthetic polypeptide
GNLDTKTPGMPK

SEQ ID NO: 29914 - protein, 13 aa, Artificial Sequence
  Synthetic polypeptide
LLELQGLPLMPSR

SEQ ID NO: 29915 - protein, 10 aa, Artificial Sequence
  Synthetic polypeptide
AGGSLEAGGK

SEQ ID NO: 29916 - protein, 25 aa, Artificial Sequence
  Synthetic polypeptide
EGDVVLYCSSATFCATSQSGTGEVR

SEQ ID NO: 29917 - protein, 10 aa, Artificial Sequence
  Synthetic polypeptide
STNDELDELR

SEQ ID NO: 29918 - protein, 13 aa, Artificial Sequence
  Synthetic polypeptide
INSAHLQTLSAGK

SEQ ID NO: 29919 - protein, 21 aa, Artificial Sequence
  Synthetic polypeptide
MGLSPASAPRPQTCFSLSTTK

SEQ ID NO: 29920 - protein, 22 aa, Artificial Sequence
  Synthetic polypeptide
MLADRSMSSSLSASQLHTVNMR

SEQ ID NO: 29921 - protein, 14 aa, Artificial Sequence
  Synthetic polypeptide
GTQVFVTGYTPWQR

SEQ ID NO: 29922 - protein, 11 aa, Artificial Sequence
  Synthetic polypeptide
METDLECSDSR

SEQ ID NO: 29923 - protein, 8 aa, Artificial Sequence
  Synthetic polypeptide
TLLPGTLR

SEQ ID NO: 29924 - protein, 11 aa, Artificial Sequence
  Synthetic polypeptide
WLMPVIPALGR

SEQ ID NO: 29925 - protein, 17 aa, Artificial Sequence
  Synthetic polypeptide
LLGAEIAPLHSSLDGLS

SEQ ID NO: 29926 - protein, 14 aa, Artificial Sequence
  Synthetic polypeptide
DPAIALQPGPQSER

SEQ ID NO: 29927 - protein, 9 aa, Artificial Sequence
  Synthetic polypeptide
MAHTLQYFK

SEQ ID NO: 29928 - protein, 15 aa, Artificial Sequence
  Synthetic polypeptide
MAHTLQYFKSSQHQR

SEQ ID NO: 29929 - protein, 11 aa, Artificial Sequence
  Synthetic polypeptide
MISAFPTEGQR

SEQ ID NO: 29930 - protein, 11 aa, Artificial Sequence
  Synthetic polypeptide
MDFMNAEILLK

SEQ ID NO: 29931 - protein, 17 aa, Artificial Sequence
  Synthetic polypeptide
SEEPLRPAAAPSENALR

SEQ ID NO: 29932 - protein, 14 aa, Artificial Sequence
  Synthetic polypeptide
TSPVAGPALPPNYK

SEQ ID NO: 29933 - protein, 11 aa, Artificial Sequence
  Synthetic polypeptide
EYLEYEDTAQR

SEQ ID NO: 29934 - protein, 10 aa, Artificial Sequence
  Synthetic polypeptide
QNLHEIGLWR

SEQ ID NO: 29935 - protein, 8 aa, Artificial Sequence
  Synthetic polypeptide
AGGSLEAK

SEQ ID NO: 29936 - protein, 23 aa, Artificial Sequence
  Synthetic polypeptide
AMSQINFFTNDPASAIGEYEDLR

SEQ ID NO: 29937 - protein, 12 aa, Artificial Sequence
  Synthetic polypeptide
LELALLAPQACR

SEQ ID NO: 29938 - protein, 20 aa, Artificial Sequence
  Synthetic polypeptide
SLVLEGFLINSKPENACEPI

SEQ ID NO: 29939 - protein, 26 aa, Artificial Sequence
  Synthetic polypeptide
TVTDSTLWIASSPGGLSPADCGASFR

SEQ ID NO: 29940 - protein, 13 aa, Artificial Sequence
  Synthetic polypeptide
IASTQEADVVVAR

SEQ ID NO: 29941 - protein, 19 aa, Artificial Sequence
  Synthetic polypeptide
LLRELQVMYGMLVFTLVLR

SEQ ID NO: 29942 - protein, 11 aa, Artificial Sequence
  Synthetic polypeptide
HTDLQATAIGK

SEQ ID NO: 29943 - protein, 13 aa, Artificial Sequence
  Synthetic polypeptide
YISLIYTNYAEGK

SEQ ID NO: 29944 - protein, 24 aa, Artificial Sequence
  Synthetic polypeptide
AQWLTPVIPALWEAEAGESPERPR

SEQ ID NO: 29945 - protein, 7 aa, Artificial Sequence
  Synthetic polypeptide
MILSSIR

SEQ ID NO: 29946 - protein, 7 aa, Artificial Sequence
  Synthetic polypeptide
MGISIVK

SEQ ID NO: 29947 - protein, 9 aa, Artificial Sequence
  Synthetic polypeptide
LLINRMVTL

SEQ ID NO: 29948 - protein, 18 aa, Artificial Sequence
  Synthetic polypeptide
MGAVAHTCNPSTLGGQGK

SEQ ID NO: 29949 - protein, 23 aa, Artificial Sequence
  Synthetic polypeptide
ALVNLSFVTGVSSMTFMMGNICR

SEQ ID NO: 29950 - protein, 7 aa, Artificial Sequence
  Synthetic polypeptide
APVSDEK

SEQ ID NO: 29951 - protein, 7 aa, Artificial Sequence
  Synthetic polypeptide
MNSLSIR

SEQ ID NO: 29952 - protein, 14 aa, Artificial Sequence
  Synthetic polypeptide
ALELGVVSQPSVYR

SEQ ID NO: 29953 - protein, 16 aa, Artificial Sequence
  Synthetic polypeptide
MGAVTHTCNPSTLEGR

SEQ ID NO: 29954 - protein, 12 aa, Artificial Sequence
  Synthetic polypeptide
ELLHGTEGGEHR

SEQ ID NO: 29955 - protein, 10 aa, Artificial Sequence
  Synthetic polypeptide
VAASSPIMRK

SEQ ID NO: 29956 - protein, 9 aa, Artificial Sequence
  Synthetic polypeptide
TITLEVEPR

SEQ ID NO: 29957 - protein, 25 aa, Artificial Sequence
  Synthetic polypeptide
MGAVAHTCNPSTLEGQDCPCGRPRR

SEQ ID NO: 29958 - protein, 16 aa, Artificial Sequence
  Synthetic polypeptide
EAEEPSDNGPLFTELK

SEQ ID NO: 29959 - protein, 10 aa, Artificial Sequence
  Synthetic polypeptide
LQDSTGSWEK

SEQ ID NO: 29960 - protein, 10 aa, Artificial Sequence
  Synthetic polypeptide
GLPSHAELIR

SEQ ID NO: 29961 - protein, 12 aa, Artificial Sequence
  Synthetic polypeptide
CNPSTLGDQAEK

SEQ ID NO: 29962 - protein, 18 aa, Artificial Sequence
  Synthetic polypeptide
QLQSANYGHMQASCLSIK

SEQ ID NO: 29963 - protein, 14 aa, Artificial Sequence
  Synthetic polypeptide
AHLNERNTLQEENK

SEQ ID NO: 29964 - protein, 19 aa, Artificial Sequence
  Synthetic polypeptide
DLYANTVMSVELNAASGTR

SEQ ID NO: 29965 - protein, 20 aa, Artificial Sequence
  Synthetic polypeptide
TEEMPQLNFGMAVLYGGMCL

SEQ ID NO: 29966 - protein, 21 aa, Artificial Sequence
  Synthetic polypeptide
ENLPSIQPGMVLQAVAHLHGR

SEQ ID NO: 29967 - protein, 15 aa, Artificial Sequence
  Synthetic polypeptide
LLNATHQIGCQYTHR

SEQ ID NO: 29968 - protein, 23 aa, Artificial Sequence
  Synthetic polypeptide
MAVVAHACNLNSFGGQGPAWFLR

SEQ ID NO: 29969 - protein, 12 aa, Artificial Sequence
  Synthetic polypeptide
MVWVGTIGSGPK

SEQ ID NO: 29970 - protein, 16 aa, Artificial Sequence
  Synthetic polypeptide
NLLDIDAPVTGWQELK

SEQ ID NO: 29971 - protein, 15 aa, Artificial Sequence
  Synthetic polypeptide
VISAFPSELQSQCTK

SEQ ID NO: 29972 - protein, 12 aa, Artificial Sequence
  Synthetic polypeptide
MACNMGLEKGEK

SEQ ID NO: 29973 - protein, 15 aa, Artificial Sequence
  Synthetic polypeptide
MLDNLMYDYELNWVR

SEQ ID NO: 29974 - protein, 14 aa, Artificial Sequence
  Synthetic polypeptide
AKIAPAEGPDVSER

SEQ ID NO: 29975 - protein, 6 aa, Artificial Sequence
  Synthetic polypeptide
MVLLVR

SEQ ID NO: 29976 - protein, 11 aa, Artificial Sequence
  Synthetic polypeptide
VGGSRVLGGDQ

SEQ ID NO: 29977 - protein, 15 aa, Artificial Sequence
  Synthetic polypeptide
NTQLTMWLPQLIWTK

SEQ ID NO: 29978 - protein, 13 aa, Artificial Sequence
  Synthetic polypeptide
MCQKEVMEQSAGR

SEQ ID NO: 29979 - protein, 25 aa, Artificial Sequence
  Synthetic polypeptide
MAQWLMPVIPALWEAQIHFILLFSR

SEQ ID NO: 29980 - protein, 12 aa, Artificial Sequence
  Synthetic polypeptide
LLSSSMHTLQTK

SEQ ID NO: 29981 - protein, 14 aa, Artificial Sequence
  Synthetic polypeptide
QQMLVCFVNLDVNK

SEQ ID NO: 29982 - protein, 21 aa, Artificial Sequence
  Synthetic polypeptide
MASTISAGCGGGACGPSYSGG

SEQ ID NO: 29983 - protein, 14 aa, Artificial Sequence
  Synthetic polypeptide
LLDEAAGEGEAAGR

SEQ ID NO: 29984 - protein, 14 aa, Artificial Sequence
  Synthetic polypeptide
TSPVAGPALPPNYK

SEQ ID NO: 29985 - protein, 17 aa, Artificial Sequence
  Synthetic polypeptide
LSTVVDADEIIVLDQEK

SEQ ID NO: 29986 - protein, 11 aa, Artificial Sequence
  Synthetic polypeptide
MDFMNAEILLK

SEQ ID NO: 29987 - protein, 28 aa, Artificial Sequence
  Synthetic polypeptide
MATVAHTSLATVEDFQIRPHTLYVHSYK

SEQ ID NO: 29988 - protein, 27 aa, Artificial Sequence
  Synthetic polypeptide
METQADLVSQEPQALLDSALREAEAGR

SEQ ID NO: 29989 - protein, 14 aa, Artificial Sequence
  Synthetic polypeptide
LLITAEDQSMWIQS

SEQ ID NO: 29990 - protein, 19 aa, Artificial Sequence
  Synthetic polypeptide
LADLFGWSQLIYNHITEYK

SEQ ID NO: 29991 - protein, 12 aa, Artificial Sequence
  Synthetic polypeptide
LLHHQLHMMLDK

SEQ ID NO: 29992 - protein, 16 aa, Artificial Sequence
  Synthetic polypeptide
LSPLPSNSCVTWGGYR

SEQ ID NO: 29993 - protein, 16 aa, Artificial Sequence
  Synthetic polypeptide
MILESTYHNTLHIAMK

SEQ ID NO: 29994 - protein, 21 aa, Artificial Sequence
  Synthetic polypeptide
MQENTLRAPTDSTLWHPPHYK

SEQ ID NO: 29995 - protein, 20 aa, Artificial Sequence
  Synthetic polypeptide
MMVNCHAHFWVSTYLSPHLL

SEQ ID NO: 29996 - protein, 10 aa, Artificial Sequence
  Synthetic polypeptide
SQVMDVDTLY

SEQ ID NO: 29997 - protein, 10 aa, Artificial Sequence
  Synthetic polypeptide
TDDSLGLGLK

SEQ ID NO: 29998 - protein, 17 aa, Artificial Sequence
  Synthetic polypeptide
GHEFETSLANMVIQLLK

SEQ ID NO: 29999 - protein, 12 aa, Artificial Sequence
  Synthetic polypeptide
MDGQMMDTGVDK

SEQ ID NO: 30000 - protein, 13 aa, Artificial Sequence
  Synthetic polypeptide
HLEDYMEHTPPPR

SEQ ID NO: 30001 - protein, 8 aa, Artificial Sequence
  Synthetic polypeptide
IFTYQICK

SEQ ID NO: 30002 - protein, 14 aa, Artificial Sequence
  Synthetic polypeptide
TENLGSILSWWHNK

SEQ ID NO: 30003 - protein, 13 aa, Artificial Sequence
  Synthetic polypeptide
MGGATSPLLSSAK

SEQ ID NO: 30004 - protein, 11 aa, Artificial Sequence
  Synthetic polypeptide
MISAFPTEGQR

SEQ ID NO: 30005 - protein, 12 aa, Artificial Sequence
  Synthetic polypeptide
TFTMIHFHLITR

SEQ ID NO: 30006 - protein, 14 aa, Artificial Sequence
  Synthetic polypeptide
LLPPCQPGSSLSSK

SEQ ID NO: 30007 - protein, 9 aa, Artificial Sequence
  Synthetic polypeptide
GLFSQAEIR

SEQ ID NO: 30008 - protein, 13 aa, Artificial Sequence
  Synthetic polypeptide
MAALTIATGLAVD

SEQ ID NO: 30009 - protein, 12 aa, Artificial Sequence
  Synthetic polypeptide
MYMAHGLTQSTK

SEQ ID NO: 30010 - protein, 13 aa, Artificial Sequence
  Synthetic polypeptide
EFETSLGLWQAMR

SEQ ID NO: 30011 - protein, 17 aa, Artificial Sequence
  Synthetic polypeptide
TAELPKPSISSNNSNPK

SEQ ID NO: 30012 - protein, 14 aa, Artificial Sequence
  Synthetic polypeptide
VQDHPGQHGEAIGK

SEQ ID NO: 30013 - protein, 10 aa, Artificial Sequence
  Synthetic polypeptide
TSLGNMINDK

SEQ ID NO: 30014 - protein, 17 aa, Artificial Sequence
  Synthetic polypeptide
MLPPFVLAVTMGLSVVK

SEQ ID NO: 30015 - protein, 13 aa, Artificial Sequence
  Synthetic polypeptide
QIGCYQGFAFAWK

SEQ ID NO: 30016 - protein, 14 aa, Artificial Sequence
  Synthetic polypeptide
SQGSGLNFIDLMVR

SEQ ID NO: 30017 - protein, 18 aa, Artificial Sequence
  Synthetic polypeptide
AWEAEIMVKYLLFMWEIK

SEQ ID NO: 30018 - protein, 11 aa, Artificial Sequence
  Synthetic polypeptide
ATVWLGSGDEK

SEQ ID NO: 30019 - protein, 28 aa, Artificial Sequence
  Synthetic polypeptide
DNTDSVVFEDVAVNFTQEEWALLGPSQK

SEQ ID NO: 30020 - protein, 8 aa, Artificial Sequence
  Synthetic polypeptide
QSLSEELK

SEQ ID NO: 30021 - protein, 15 aa, Artificial Sequence
  Synthetic polypeptide
AAAVAAKAEAVSPAK

SEQ ID NO: 30022 - protein, 10 aa, Artificial Sequence
  Synthetic polypeptide
KLILCLNDCK

SEQ ID NO: 30023 - protein, 18 aa, Artificial Sequence
  Synthetic polypeptide
TGAQPPATMPLNVSFTNR

SEQ ID NO: 30024 - protein, 11 aa, Artificial Sequence
  Synthetic polypeptide
DLEFETSLANK

SEQ ID NO: 30025 - protein, 18 aa, Artificial Sequence
  Synthetic polypeptide
LSSQHLGGQEPEQLPEKR

SEQ ID NO: 30026 - protein, 12 aa, Artificial Sequence
  Synthetic polypeptide
TPEVEATVPLQK

SEQ ID NO: 30027 - protein, 14 aa, Artificial Sequence
  Synthetic polypeptide
ISQLQIWDTAGQER

SEQ ID NO: 30028 - protein, 12 aa, Artificial Sequence
  Synthetic polypeptide
VILIFFPECYAK

SEQ ID NO: 30029 - protein, 10 aa, Artificial Sequence
  Synthetic polypeptide
IRDSEELIGR

SEQ ID NO: 30030 - protein, 16 aa, Artificial Sequence
  Synthetic polypeptide
MLAPENSDIGLAAWGR

SEQ ID NO: 30031 - protein, 14 aa, Artificial Sequence
  Synthetic polypeptide
QETPMAADEGSAEK

SEQ ID NO: 30032 - protein, 22 aa, Artificial Sequence
  Synthetic polypeptide
MLADRSMSSSLSASQLHTVNMR

SEQ ID NO: 30033 - protein, 12 aa, Artificial Sequence
  Synthetic polypeptide
LGVGSDSEVEER

SEQ ID NO: 30034 - protein, 9 aa, Artificial Sequence
  Synthetic polypeptide
IQEAEVAVK

SEQ ID NO: 30035 - protein, 9 aa, Artificial Sequence
  Synthetic polypeptide
IDMISCVWK

SEQ ID NO: 30036 - protein, 23 aa, Artificial Sequence
  Synthetic polypeptide
MGVVAHTCNPNTLGGQGIEMHQR

SEQ ID NO: 30037 - protein, 18 aa, Artificial Sequence
  Synthetic polypeptide
EDQMSSWSISTSVQPSGR

SEQ ID NO: 30038 - protein, 14 aa, Artificial Sequence
  Synthetic polypeptide
MLLTHWLNLADHWR

SEQ ID NO: 30039 - protein, 13 aa, Artificial Sequence
  Synthetic polypeptide
MEQFVQVYNWIDV

SEQ ID NO: 30040 - protein, 18 aa, Artificial Sequence
  Synthetic polypeptide
LLSSLFSEPTCLILVSPQ

SEQ ID NO: 30041 - protein, 14 aa, Artificial Sequence
  Synthetic polypeptide
TAQLPEQLMTWHSR

SEQ ID NO: 30042 - protein, 17 aa, Artificial Sequence
  Synthetic polypeptide
SYQLRPGTMIEWGNYWR

SEQ ID NO: 30043 - protein, 19 aa, Artificial Sequence
  Synthetic polypeptide
QEDPLNLTCPSCGITFAPK

SEQ ID NO: 30044 - protein, 12 aa, Artificial Sequence
  Synthetic polypeptide
TQEAEVANAASK

SEQ ID NO: 30045 - protein, 13 aa, Artificial Sequence
  Synthetic polypeptide
ITSVVMVDEAHER

SEQ ID NO: 30046 - protein, 16 aa, Artificial Sequence
  Synthetic polypeptide
NIFSCISMGNFGGPGK

SEQ ID NO: 30047 - protein, 22 aa, Artificial Sequence
  Synthetic polypeptide
VISAFPSEVPGSSHSGVPDSGR

SEQ ID NO: 30048 - protein, 19 aa, Artificial Sequence
  Synthetic polypeptide
DILMYMVWWCVPMMPATRR

SEQ ID NO: 30049 - protein, 15 aa, Artificial Sequence
  Synthetic polypeptide
GQEIQTILANTCIPR

SEQ ID NO: 30050 - protein, 11 aa, Artificial Sequence
  Synthetic polypeptide
METDLECSDSR

SEQ ID NO: 30051 - protein, 18 aa, Artificial Sequence
  Synthetic polypeptide
MLSFMRPPQPCFLYSLWN

SEQ ID NO: 30052 - protein, 14 aa, Artificial Sequence
  Synthetic polypeptide
MLEKLEFEDEVPGP

SEQ ID NO: 30053 - protein, 19 aa, Artificial Sequence
  Synthetic polypeptide
MELTIPGVGHSSGSLNEGK

SEQ ID NO: 30054 - protein, 9 aa, Artificial Sequence
  Synthetic polypeptide
MASICPFLK

SEQ ID NO: 30055 - protein, 13 aa, Artificial Sequence
  Synthetic polypeptide
AFLAMIHSVSSMK

SEQ ID NO: 30056 - protein, 18 aa, Artificial Sequence
  Synthetic polypeptide
LSLSEDTDNSSLSPPPAK

SEQ ID NO: 30057 - protein, 12 aa, Artificial Sequence
  Synthetic polypeptide
LHHWTPAWAAEK

SEQ ID NO: 30058 - protein, 8 aa, Artificial Sequence
  Synthetic polypeptide
TISPFTGK

SEQ ID NO: 30059 - protein, 18 aa, Artificial Sequence
  Synthetic polypeptide
MSAALMFDAVHVVVSAVR

SEQ ID NO: 30060 - protein, 11 aa, Artificial Sequence
  Synthetic polypeptide
MLLTTFVIHGR

SEQ ID NO: 30061 - protein, 12 aa, Artificial Sequence
  Synthetic polypeptide
MLLTTFVIHGRR

SEQ ID NO: 30062 - protein, 17 aa, Artificial Sequence
  Synthetic polypeptide
EYIVPMLTGLQPIMIIQ

SEQ ID NO: 30063 - protein, 13 aa, Artificial Sequence
  Synthetic polypeptide
PQNSTASVSEAER

SEQ ID NO: 30064 - protein, 11 aa, Artificial Sequence
  Synthetic polypeptide
SVSTIFLTCSR

SEQ ID NO: 30065 - protein, 20 aa, Artificial Sequence
  Synthetic polypeptide
MVILESMVSLTQELCPVAMR

SEQ ID NO: 30066 - protein, 7 aa, Artificial Sequence
  Synthetic polypeptide
VSTEEEK

SEQ ID NO: 30067 - protein, 17 aa, Artificial Sequence
  Synthetic polypeptide
MAHLLPNVSEETVSPTR

SEQ ID NO: 30068 - protein, 23 aa, Artificial Sequence
  Synthetic polypeptide
MGTVADTCDPSTLGGGVCDTAYR

SEQ ID NO: 30069 - protein, 13 aa, Artificial Sequence
  Synthetic polypeptide
MLQPSQEVGTISK

SEQ ID NO: 30070 - protein, 20 aa, Artificial Sequence
  Synthetic polypeptide
TQSLGVDEVTIVNILTNRSN

SEQ ID NO: 30071 - protein, 12 aa, Artificial Sequence
  Synthetic polypeptide
MPGPLRSLEMAR

SEQ ID NO: 30072 - protein, 11 aa, Artificial Sequence
  Synthetic polypeptide
VMGLVIPDVPK

SEQ ID NO: 30073 - protein, 12 aa, Artificial Sequence
  Synthetic polypeptide
LHHCTPAWLTER

SEQ ID NO: 30074 - protein, 10 aa, Artificial Sequence
  Synthetic polypeptide
MLSTSWTLPR

SEQ ID NO: 30075 - protein, 18 aa, Artificial Sequence
  Synthetic polypeptide
LAPALLSAMIFAVLWSTR

SEQ ID NO: 30076 - protein, 9 aa, Artificial Sequence
  Synthetic polypeptide
NGISGQVLK

SEQ ID NO: 30077 - protein, 14 aa, Artificial Sequence
  Synthetic polypeptide
MQLDQICISFDEGK

SEQ ID NO: 30078 - protein, 13 aa, Artificial Sequence
  Synthetic polypeptide
MGAWLTPDTGVGK

SEQ ID NO: 30079 - protein, 10 aa, Artificial Sequence
  Synthetic polypeptide
STNDELDELR

SEQ ID NO: 30080 - protein, 12 aa, Artificial Sequence
  Synthetic polypeptide
EAEAGESLKPGR

SEQ ID NO: 30081 - protein, 20 aa, Artificial Sequence
  Synthetic polypeptide
SQILGMQSLALVAQSGVQWR

SEQ ID NO: 30082 - protein, 25 aa, Artificial Sequence
  Synthetic polypeptide
WQIYSGPLPTSPGAACLPCFSCGAK

SEQ ID NO: 30083 - protein, 11 aa, Artificial Sequence
  Synthetic polypeptide
EYLEYEDTAQR

SEQ ID NO: 30084 - protein, 15 aa, Artificial Sequence
  Synthetic polypeptide
SSGAQGEYAGLATIR

SEQ ID NO: 30085 - protein, 19 aa, Artificial Sequence
  Synthetic polypeptide
AGGSGSVVIWTVPTGSWQK

SEQ ID NO: 30086 - protein, 10 aa, Artificial Sequence
  Synthetic polypeptide
VNGYPNYLIR

SEQ ID NO: 30087 - protein, 11 aa, Artificial Sequence
  Synthetic polypeptide
MASAWEGGAWR

SEQ ID NO: 30088 - protein, 17 aa, Artificial Sequence
  Synthetic polypeptide
CMCLEYPAVVEFAPFQK

SEQ ID NO: 30089 - protein, 11 aa, Artificial Sequence
  Synthetic polypeptide
TSLANMVGMFK

SEQ ID NO: 30090 - protein, 16 aa, Artificial Sequence
  Synthetic polypeptide
FSEASVAMLPVQLWNR

SEQ ID NO: 30091 - protein, 13 aa, Artificial Sequence
  Synthetic polypeptide
VETLCATLWGFGK

SEQ ID NO: 30092 - protein, 18 aa, Artificial Sequence
  Synthetic polypeptide
MDLVQVSGSLGSPVLSCK

SEQ ID NO: 30093 - protein, 15 aa, Artificial Sequence
  Synthetic polypeptide
MVAGPTYLGDLCPPK

SEQ ID NO: 30094 - protein, 8 aa, Artificial Sequence
  Synthetic polypeptide
HCHALMPK

SEQ ID NO: 30095 - protein, 9 aa, Artificial Sequence
  Synthetic polypeptide
ASGSQGMFK

SEQ ID NO: 30096 - protein, 9 aa, Artificial Sequence
  Synthetic polypeptide
IVESGDTPK

SEQ ID NO: 30097 - protein, 13 aa, Artificial Sequence
  Synthetic polypeptide
ASGSLEGPFVTWR

SEQ ID NO: 30098 - protein, 11 aa, Artificial Sequence
  Synthetic polypeptide
ENTMAENELQV

SEQ ID NO: 30099 - protein, 10 aa, Artificial Sequence
  Synthetic polypeptide
TVTVPAQELK

SEQ ID NO: 30100 - protein, 14 aa, Artificial Sequence
  Synthetic polypeptide
NLQLSAHLLTSSLK

SEQ ID NO: 30101 - protein, 15 aa, Artificial Sequence
  Synthetic polypeptide
NLDLLEGMESTQMPK

SEQ ID NO: 30102 - protein, 15 aa, Artificial Sequence
  Synthetic polypeptide
LDGHAGDLDIEDDMK

SEQ ID NO: 30103 - protein, 9 aa, Artificial Sequence
  Synthetic polypeptide
MTKLLSPIR

SEQ ID NO: 30104 - protein, 9 aa, Artificial Sequence
  Synthetic polypeptide
YEEEIRTCR

SEQ ID NO: 30105 - protein, 18 aa, Artificial Sequence
  Synthetic polypeptide
QAWRLMPVIPAHWEAEVK

SEQ ID NO: 30106 - protein, 15 aa, Artificial Sequence
  Synthetic polypeptide
AEIALLHSSLGNREK

SEQ ID NO: 30107 - protein, 25 aa, Artificial Sequence
  Synthetic polypeptide
TFWTNDDPGLEVLVPEGGVLPETQQ

SEQ ID NO: 30108 - protein, 19 aa, Artificial Sequence
  Synthetic polypeptide
QEAEIPGANLNVEILSSCR

SEQ ID NO: 30109 - protein, 15 aa, Artificial Sequence
  Synthetic polypeptide
LNEGASGLDGKPGSR

SEQ ID NO: 30110 - protein, 14 aa, Artificial Sequence
  Synthetic polypeptide
MESQLQIEETTLLR

SEQ ID NO: 30111 - protein, 25 aa, Artificial Sequence
  Synthetic polypeptide
MSDPVFLSLSLLVCETGDHEKRNGR

SEQ ID NO: 30112 - protein, 13 aa, Artificial Sequence
  Synthetic polypeptide
ICHFLSVTGSLLR

SEQ ID NO: 30113 - protein, 13 aa, Artificial Sequence
  Synthetic polypeptide
MSSINPNTSATWK

SEQ ID NO: 30114 - protein, 9 aa, Artificial Sequence
  Synthetic polypeptide
IILANTFSK

SEQ ID NO: 30115 - protein, 13 aa, Artificial Sequence
  Synthetic polypeptide
FCRLLNGLGEEIK

SEQ ID NO: 30116 - protein, 13 aa, Artificial Sequence
  Synthetic polypeptide
AQEFETSLGNMFR

SEQ ID NO: 30117 - protein, 15 aa, Artificial Sequence
  Synthetic polypeptide
MSDQEKGPIVSSGVR

SEQ ID NO: 30118 - protein, 17 aa, Artificial Sequence
  Synthetic polypeptide
TNYAASSYLSLTPEQWK

SEQ ID NO: 30119 - protein, 12 aa, Artificial Sequence
  Synthetic polypeptide
TSLGNMLTADPR

SEQ ID NO: 30120 - protein, 11 aa, Artificial Sequence
  Synthetic polypeptide
SPVTMEQLICK

SEQ ID NO: 30121 - protein, 22 aa, Artificial Sequence
  Synthetic polypeptide
GAGPAVPGGPVPAGATLTTGAR

SEQ ID NO: 30122 - protein, 16 aa, Artificial Sequence
  Synthetic polypeptide
GQEFETSLANMETPGR

SEQ ID NO: 30123 - protein, 15 aa, Artificial Sequence
  Synthetic polypeptide
FVDVTECQACSANSR

SEQ ID NO: 30124 - protein, 10 aa, Artificial Sequence
  Synthetic polypeptide
TELNIVPVPR

SEQ ID NO: 30125 - protein, 15 aa, Artificial Sequence
  Synthetic polypeptide
MTLATDGTADMFGIR

SEQ ID NO: 30126 - protein, 20 aa, Artificial Sequence
  Synthetic polypeptide
MELSAQFAATTTTPPRPLGR

SEQ ID NO: 30127 - protein, 25 aa, Artificial Sequence
  Synthetic polypeptide
EAIALCHFFFNISGILLWYPIPFTR

SEQ ID NO: 30128 - protein, 12 aa, Artificial Sequence
  Synthetic polypeptide
DAAALLLANEAR

SEQ ID NO: 30129 - protein, 10 aa, Artificial Sequence
  Synthetic polypeptide
MELTIPGVGK

SEQ ID NO: 30130 - protein, 24 aa, Artificial Sequence
  Synthetic polypeptide
METPAQLLFLLLLWLPAEAGGIMR

SEQ ID NO: 30131 - protein, 21 aa, Artificial Sequence
  Synthetic polypeptide
MGAVTHIWNPRTLGGQDPDHR

SEQ ID NO: 30132 - protein, 14 aa, Artificial Sequence
  Synthetic polypeptide
LTMGSTGCDRPLDK

SEQ ID NO: 30133 - protein, 16 aa, Artificial Sequence
  Synthetic polypeptide
WGGQAPPGQPPRPGGR

SEQ ID NO: 30134 - protein, 13 aa, Artificial Sequence
  Synthetic polypeptide
LRQEQLLEPRMQR

SEQ ID NO: 30135 - protein, 7 aa, Artificial Sequence
  Synthetic polypeptide
TLEVEGK

SEQ ID NO: 30136 - protein, 9 aa, Artificial Sequence
  Synthetic polypeptide
NLEASWATR

SEQ ID NO: 30137 - protein, 14 aa, Artificial Sequence
  Synthetic polypeptide
ELYPGQFKPPICLL

SEQ ID NO: 30138 - protein, 10 aa, Artificial Sequence
  Synthetic polypeptide
MLVSASQDGK

SEQ ID NO: 30139 - protein, 13 aa, Artificial Sequence
  Synthetic polypeptide
AGFYEQMNGPVAG

SEQ ID NO: 30140 - protein, 9 aa, Artificial Sequence
  Synthetic polypeptide
MLGTRPHGR

SEQ ID NO: 30141 - protein, 16 aa, Artificial Sequence
  Synthetic polypeptide
LAVNSPPVEPPEQHSR

SEQ ID NO: 30142 - protein, 13 aa, Artificial Sequence
  Synthetic polypeptide
MIVMNDQMDSSLK

SEQ ID NO: 30143 - protein, 23 aa, Artificial Sequence
  Synthetic polypeptide
MGTVAHACNTSTLGGQEHCEGLR

SEQ ID NO: 30144 - protein, 9 aa, Artificial Sequence
  Synthetic polypeptide
MSLCILSMK

SEQ ID NO: 30145 - protein, 12 aa, Artificial Sequence
  Synthetic polypeptide
IPTVTPGAASSC

SEQ ID NO: 30146 - protein, 11 aa, Artificial Sequence
  Synthetic polypeptide
TITDAELPIYR

SEQ ID NO: 30147 - protein, 15 aa, Artificial Sequence
  Synthetic polypeptide
GLEWVSQISESTNSL

SEQ ID NO: 30148 - protein, 10 aa, Artificial Sequence
  Synthetic polypeptide
VAVSVLSPGK

SEQ ID NO: 30149 - protein, 21 aa, Artificial Sequence
  Synthetic polypeptide
GQVIGEIDEETDSALDLGNIR

SEQ ID NO: 30150 - protein, 17 aa, Artificial Sequence
  Synthetic polypeptide
DQPGQHGPGMRPPLGLR

SEQ ID NO: 30151 - protein, 16 aa, Artificial Sequence
  Synthetic polypeptide
VILVNLGSSAEWVFQR

SEQ ID NO: 30152 - protein, 15 aa, Artificial Sequence
  Synthetic polypeptide
TTALQPGHSDLVTAR

SEQ ID NO: 30153 - protein, 8 aa, Artificial Sequence
  Synthetic polypeptide
LSVLSQPK

SEQ ID NO: 30154 - protein, 10 aa, Artificial Sequence
  Synthetic polypeptide
SNLNTGVPSR

SEQ ID NO: 30155 - protein, 8 aa, Artificial Sequence
  Synthetic polypeptide
LDSQYVER

SEQ ID NO: 30156 - protein, 11 aa, Artificial Sequence
  Synthetic polypeptide
DIVRSDLEGKR

SEQ ID NO: 30157 - protein, 12 aa, Artificial Sequence
  Synthetic polypeptide
AEIAPLNSSLGR

SEQ ID NO: 30158 - protein, 11 aa, Artificial Sequence
  Synthetic polypeptide
TFTGGAVIVQK

SEQ ID NO: 30159 - protein, 11 aa, Artificial Sequence
  Synthetic polypeptide
VETSDEEIHKK

SEQ ID NO: 30160 - protein, 19 aa, Artificial Sequence
  Synthetic polypeptide
SQLLERPRQENRLNLGASR

SEQ ID NO: 30161 - protein, 14 aa, Artificial Sequence
  Synthetic polypeptide
LSLGSRIDQINISR

SEQ ID NO: 30162 - protein, 17 aa, Artificial Sequence
  Synthetic polypeptide
NGKFPSLLTHNENMVAK

SEQ ID NO: 30163 - protein, 7 aa, Artificial Sequence
  Synthetic polypeptide
ACLAEGR

SEQ ID NO: 30164 - protein, 13 aa, Artificial Sequence
  Synthetic polypeptide
ILNCQKAMAPSFR

SEQ ID NO: 30165 - protein, 17 aa, Artificial Sequence
  Synthetic polypeptide
TEFLSFMNTELAAFTKK

SEQ ID NO: 30166 - protein, 8 aa, Artificial Sequence
  Synthetic polypeptide
VLGVGSTR

SEQ ID NO: 30167 - protein, 13 aa, Artificial Sequence
  Synthetic polypeptide
QNLQQAQCGLDLR

SEQ ID NO: 30168 - protein, 21 aa, Artificial Sequence
  Synthetic polypeptide
MRRPGQASAFLGLSFFTLYLR

SEQ ID NO: 30169 - protein, 13 aa, Artificial Sequence
  Synthetic polypeptide
TQGGSMGNSSSSR

SEQ ID NO: 30170 - protein, 12 aa, Artificial Sequence
  Synthetic polypeptide
NLDNLPSRLSIR

SEQ ID NO: 30171 - protein, 15 aa, Artificial Sequence
  Synthetic polypeptide
VVSKVEFVHFLAFIK

SEQ ID NO: 30172 - protein, 12 aa, Artificial Sequence
  Synthetic polypeptide
LPRTGIGAPRTR

SEQ ID NO: 30173 - protein, 9 aa, Artificial Sequence
  Synthetic polypeptide
MGWMGEAVR

SEQ ID NO: 30174 - protein, 12 aa, Artificial Sequence
  Synthetic polypeptide
MALSQCGPGKPK

SEQ ID NO: 30175 - protein, 10 aa, Artificial Sequence
  Synthetic polypeptide
LLITTSAGGR

SEQ ID NO: 30176 - protein, 11 aa, Artificial Sequence
  Synthetic polypeptide
LSCAASGFTLR

SEQ ID NO: 30177 - protein, 16 aa, Artificial Sequence
  Synthetic polypeptide
ASQASVPPASLPCPSR

SEQ ID NO: 30178 - protein, 7 aa, Artificial Sequence
  Synthetic polypeptide
ASVTLIR

SEQ ID NO: 30179 - protein, 7 aa, Artificial Sequence
  Synthetic polypeptide
MNSLSIR

SEQ ID NO: 30180 - protein, 10 aa, Artificial Sequence
  Synthetic polypeptide
APVTGWQELK

SEQ ID NO: 30181 - protein, 13 aa, Artificial Sequence
  Synthetic polypeptide
MEAYTPKLTQLLK

SEQ ID NO: 30182 - protein, 17 aa, Artificial Sequence
  Synthetic polypeptide
SHLLGRLSQENHWNLIK

SEQ ID NO: 30183 - protein, 15 aa, Artificial Sequence
  Synthetic polypeptide
GLEFETSLANMHGKK

SEQ ID NO: 30184 - protein, 23 aa, Artificial Sequence
  Synthetic polypeptide
TNVQQTTDLEIPPPGTVGYCAVK

SEQ ID NO: 30185 - protein, 19 aa, Artificial Sequence
  Synthetic polypeptide
LARHGWAEAFAGIRSSHIK

SEQ ID NO: 30186 - protein, 14 aa, Artificial Sequence
  Synthetic polypeptide
MATVYFTRATSQCK

SEQ ID NO: 30187 - protein, 12 aa, Artificial Sequence
  Synthetic polypeptide
LGGSSCLVAYKK

SEQ ID NO: 30188 - protein, 14 aa, Artificial Sequence
  Synthetic polypeptide
LLIYAASNGHSGQQ

SEQ ID NO: 30189 - protein, 9 aa, Artificial Sequence
  Synthetic polypeptide
MAACLGLPK

SEQ ID NO: 30190 - protein, 17 aa, Artificial Sequence
  Synthetic polypeptide
MSLGLSIHHLSDGSGIK

SEQ ID NO: 30191 - protein, 11 aa, Artificial Sequence
  Synthetic polypeptide
AEDTATSCRAK

SEQ ID NO: 30192 - protein, 15 aa, Artificial Sequence
  Synthetic polypeptide
ISSEQLFCFTLINPK

SEQ ID NO: 30193 - protein, 13 aa, Artificial Sequence
  Synthetic polypeptide
AIALQPGQQRETR

SEQ ID NO: 30194 - protein, 28 aa, Artificial Sequence
  Synthetic polypeptide
MGVVAHACNSSTLGGQDPLDLLHLPGVR

SEQ ID NO: 30195 - protein, 10 aa, Artificial Sequence
  Synthetic polypeptide
MELTIPGEGK

SEQ ID NO: 30196 - protein, 13 aa, Artificial Sequence
  Synthetic polypeptide
MAAAALRDPAQSR

SEQ ID NO: 30197 - protein, 10 aa, Artificial Sequence
  Synthetic polypeptide
GPSPSGAEPR

SEQ ID NO: 30198 - protein, 12 aa, Artificial Sequence
  Synthetic polypeptide
LLSSSMHTLQTK

SEQ ID NO: 30199 - protein, 17 aa, Artificial Sequence
  Synthetic polypeptide
SSRPAWPTWCLPPGPGR

SEQ ID NO: 30200 - protein, 8 aa, Artificial Sequence
  Synthetic polypeptide
MTDGGLAL

SEQ ID NO: 30201 - protein, 20 aa, Artificial Sequence
  Synthetic polypeptide
QFWNHFVCIVEETEADVNPK

SEQ ID NO: 30202 - protein, 16 aa, Artificial Sequence
  Synthetic polypeptide
GLILLEQDTAVQNMHK

SEQ ID NO: 30203 - protein, 11 aa, Artificial Sequence
  Synthetic polypeptide
LASVFQLQLLR

SEQ ID NO: 30204 - protein, 10 aa, Artificial Sequence
  Synthetic polypeptide
DASKGVSLHK

SEQ ID NO: 30205 - protein, 36 aa, Artificial Sequence
  Synthetic polypeptide
YAGRPLQCLIQDGILNPHAASCTCAACCDDMTLLLR

SEQ ID NO: 30206 - protein, 19 aa, Artificial Sequence
  Synthetic polypeptide
FQTSGLQNCSFKRWSMILK

SEQ ID NO: 30207 - protein, 23 aa, Artificial Sequence
  Synthetic polypeptide
QLWTLIGMEMVPEESTLTSLGIK

SEQ ID NO: 30208 - protein, 20 aa, Artificial Sequence
  Synthetic polypeptide
PAAVALACNPSTLRGRGMPR

SEQ ID NO: 30209 - protein, 18 aa, Artificial Sequence
  Synthetic polypeptide
VIHDNFGIVEGLMTVTPK

SEQ ID NO: 30210 - protein, 18 aa, Artificial Sequence
  Synthetic polypeptide
EFETSLANMLLDHYQNCK

SEQ ID NO: 30211 - protein, 22 aa, Artificial Sequence
  Synthetic polypeptide
AHSTLQDEAESFMHVQLEVMVR

SEQ ID NO: 30212 - protein, 14 aa, Artificial Sequence
  Synthetic polypeptide
HLEEATVAELSSCR

SEQ ID NO: 30213 - protein, 9 aa, Artificial Sequence
  Synthetic polypeptide
SLNLYNCNS

SEQ ID NO: 30214 - protein, 28 aa, Artificial Sequence
  Synthetic polypeptide
GAILTTMLATRNFSDAVASLDPRSCDSR

SEQ ID NO: 30215 - protein, 26 aa, Artificial Sequence
  Synthetic polypeptide
QMTQVTMPGEPVDVACGVDHMVTLAK

SEQ ID NO: 30216 - protein, 17 aa, Artificial Sequence
  Synthetic polypeptide
QVISAFPTEISTAMPVK

SEQ ID NO: 30217 - protein, 18 aa, Artificial Sequence
  Synthetic polypeptide
WVYEVQAGAARDALQGFK

SEQ ID NO: 30218 - protein, 24 aa, Artificial Sequence
  Synthetic polypeptide
QVDCLGPGVPDQPGQHDITRSGAK

SEQ ID NO: 30219 - protein, 15 aa, Artificial Sequence
  Synthetic polypeptide
YEEASIPFVGILVEK

SEQ ID NO: 30220 - protein, 28 aa, Artificial Sequence
  Synthetic polypeptide
QEQSSSPAMEQSWMENDFDKLTELGFRR

SEQ ID NO: 30221 - protein, 10 aa, Artificial Sequence
  Synthetic polypeptide
LFFLLLTSCR

SEQ ID NO: 30222 - protein, 15 aa, Artificial Sequence
  Synthetic polypeptide
AASRGVTFLFPIQAK

SEQ ID NO: 30223 - protein, 16 aa, Artificial Sequence
  Synthetic polypeptide
NPSTLGGQASPSPSPK

SEQ ID NO: 30224 - protein, 20 aa, Artificial Sequence
  Synthetic polypeptide
IIQVWWHVPVVPAAQEAEVR

SEQ ID NO: 30225 - protein, 14 aa, Artificial Sequence
  Synthetic polypeptide
MWSGLPSRGLPIFK

SEQ ID NO: 30226 - protein, 13 aa, Artificial Sequence
  Synthetic polypeptide
FLGLGFFICNMRR

SEQ ID NO: 30227 - protein, 16 aa, Artificial Sequence
  Synthetic polypeptide
AEIAPLHSSLGDRAAK

SEQ ID NO: 30228 - protein, 14 aa, Artificial Sequence
  Synthetic polypeptide
LLPVIPELWEAEMR

SEQ ID NO: 30229 - protein, 29 aa, Artificial Sequence
  Synthetic polypeptide
MDGPAEPQIPGLWDTYEDDISEISYLPKR

SEQ ID NO: 30230 - protein, 17 aa, Artificial Sequence
  Synthetic polypeptide
NLGSVWWLEVAELTNPS

SEQ ID NO: 30231 - protein, 19 aa, Artificial Sequence
  Synthetic polypeptide
TSLGNMCVIQSWVTSGTAK

SEQ ID NO: 30232 - protein, 19 aa, Artificial Sequence
  Synthetic polypeptide
EAANMILVDDDFSAIIIGK

SEQ ID NO: 30233 - protein, 17 aa, Artificial Sequence
  Synthetic polypeptide
MAHAYNPSTLGSQAPIK

SEQ ID NO: 30234 - protein, 13 aa, Artificial Sequence
  Synthetic polypeptide
MQVSLHPKCKADK

SEQ ID NO: 30235 - protein, 15 aa, Artificial Sequence
  Synthetic polypeptide
GQLRPHTWLSIRSTR

SEQ ID NO: 30236 - protein, 18 aa, Artificial Sequence
  Synthetic polypeptide
MMKPGLASIQSRIAILSR

SEQ ID NO: 30237 - protein, 24 aa, Artificial Sequence
  Synthetic polypeptide
WRHGTPAWLIQVLLEDETTESAVK

SEQ ID NO: 30238 - protein, 12 aa, Artificial Sequence
  Synthetic polypeptide
TDSREAEFPQKK

SEQ ID NO: 30239 - protein, 11 aa, Artificial Sequence
  Synthetic polypeptide
ATVLFYSYKPK

SEQ ID NO: 30240 - protein, 16 aa, Artificial Sequence
  Synthetic polypeptide
LLLSSLSSLGDSAPER

SEQ ID NO: 30241 - protein, 24 aa, Artificial Sequence
  Synthetic polypeptide
DLGQVISLDLHIFICEVSRVPMIR

SEQ ID NO: 30242 - protein, 8 aa, Artificial Sequence
  Synthetic polypeptide
ILWWSQGK

SEQ ID NO: 30243 - protein, 22 aa, Artificial Sequence
  Synthetic polypeptide
SLGLSFHICIIEAAGRGGEAVK

SEQ ID NO: 30244 - protein, 12 aa, Artificial Sequence
  Synthetic polypeptide
VISAFPSEVSRR

SEQ ID NO: 30245 - protein, 11 aa, Artificial Sequence
  Synthetic polypeptide
MISSTSVYAPK

SEQ ID NO: 30246 - protein, 28 aa, Artificial Sequence
  Synthetic polypeptide
GLPSHTELSMICSRASMTPLWGRPPWPR

SEQ ID NO: 30247 - protein, 14 aa, Artificial Sequence
  Synthetic polypeptide
GIPSQVELAWHWKR

SEQ ID NO: 30248 - protein, 11 aa, Artificial Sequence
  Synthetic polypeptide
VTLGISSPVKK

SEQ ID NO: 30249 - protein, 19 aa, Artificial Sequence
  Synthetic polypeptide
ICKAMLELLEDPVLCALAK

SEQ ID NO: 30250 - protein, 20 aa, Artificial Sequence
  Synthetic polypeptide
TCAMAQNIPEGQKLDILLNK

SEQ ID NO: 30251 - protein, 10 aa, Artificial Sequence
  Synthetic polypeptide
HVVQGIQIIR

SEQ ID NO: 30252 - protein, 17 aa, Artificial Sequence
  Synthetic polypeptide
VTGSLQDGMTTGPPRRR

SEQ ID NO: 30253 - protein, 23 aa, Artificial Sequence
  Synthetic polypeptide
YLSPEAEVAVSRDCATALQPGVK

SEQ ID NO: 30254 - protein, 10 aa, Artificial Sequence
  Synthetic polypeptide
QLLCIVSNQK

SEQ ID NO: 30255 - protein, 26 aa, Artificial Sequence
  Synthetic polypeptide
FVSDEMSKDCLSILYNTCVCTEGVTK

SEQ ID NO: 30256 - protein, 22 aa, Artificial Sequence
  Synthetic polypeptide
QLEYLARIQGFQASLFPETQQY

SEQ ID NO: 30257 - protein, 28 aa, Artificial Sequence
  Synthetic polypeptide
LQGERISGNLDAPEGGFDAILQTAVCTK

SEQ ID NO: 30258 - protein, 13 aa, Artificial Sequence
  Synthetic polypeptide
LLEILGATIENSR

SEQ ID NO: 30259 - protein, 9 aa, Artificial Sequence
  Synthetic polypeptide
MTKLLSPIR

SEQ ID NO: 30260 - protein, 12 aa, Artificial Sequence
  Synthetic polypeptide
VLILCQHEALVK

SEQ ID NO: 30261 - protein, 13 aa, Artificial Sequence
  Synthetic polypeptide
DDSEPGMPVLPPR

SEQ ID NO: 30262 - protein, 21 aa, Artificial Sequence
  Synthetic polypeptide
QWTEILHFTDFPISLDTTILK

SEQ ID NO: 30263 - protein, 8 aa, Artificial Sequence
  Synthetic polypeptide
MSVLGELS

SEQ ID NO: 30264 - protein, 18 aa, Artificial Sequence
  Synthetic polypeptide
GQEIKTILANTEWTYPMR

SEQ ID NO: 30265 - protein, 23 aa, Artificial Sequence
  Synthetic polypeptide
FSSHSEMVIITTITSNSQGEAAR

SEQ ID NO: 30266 - protein, 15 aa, Artificial Sequence
  Synthetic polypeptide
TENQTPHVLTHRPPK

SEQ ID NO: 30267 - protein, 11 aa, Artificial Sequence
  Synthetic polypeptide
QAFLEQTRPLR

SEQ ID NO: 30268 - protein, 12 aa, Artificial Sequence
  Synthetic polypeptide
ESFSDFSSSILK

SEQ ID NO: 30269 - protein, 34 aa, Artificial Sequence
  Synthetic polypeptide
QVLWLMPMIPALSEAEAAGSLETSLGNMTSAWCR

SEQ ID NO: 30270 - protein, 18 aa, Artificial Sequence
  Synthetic polypeptide
QTDHLRPGVQHQSGQHSK

SEQ ID NO: 30271 - protein, 17 aa, Artificial Sequence
  Synthetic polypeptide
IEDFGVHCKQMTSHLTK

SEQ ID NO: 30272 - protein, 18 aa, Artificial Sequence
  Synthetic polypeptide
YFDYWGQGTLVTQSPPSK

SEQ ID NO: 30273 - protein, 17 aa, Artificial Sequence
  Synthetic polypeptide
AVALYEGTLSLCSEDLK

SEQ ID NO: 30274 - protein, 20 aa, Artificial Sequence
  Synthetic polypeptide
MPSLNTSRPSGVPDRFSGSK

SEQ ID NO: 30275 - protein, 11 aa, Artificial Sequence
  Synthetic polypeptide
IVGNMFNQMAK

SEQ ID NO: 30276 - protein, 9 aa, Artificial Sequence
  Synthetic polypeptide
LLIYAAATR

SEQ ID NO: 30277 - protein, 13 aa, Artificial Sequence
  Synthetic polypeptide
LFSIHLLSALGPK

SEQ ID NO: 30278 - protein, 10 aa, Artificial Sequence
  Synthetic polypeptide
LCPAATLSER

SEQ ID NO: 30279 - protein, 10 aa, Artificial Sequence
  Synthetic polypeptide
TVEQGVGVWR

SEQ ID NO: 30280 - protein, 8 aa, Artificial Sequence
  Synthetic polypeptide
GLEWIGTK

SEQ ID NO: 30281 - protein, 18 aa, Artificial Sequence
  Synthetic polypeptide
QRPLCCDEQPHQTAFGPK

SEQ ID NO: 30282 - protein, 13 aa, Artificial Sequence
  Synthetic polypeptide
MIVMNDQMDSSLK

SEQ ID NO: 30283 - protein, 30 aa, Artificial Sequence
  Synthetic polypeptide
PGVVAHACNPSTLGGRDLHGMVQLPPAEGR

SEQ ID NO: 30284 - protein, 26 aa, Artificial Sequence
  Synthetic polypeptide
MSPQLLTPGSGAHSQVQLVQSGAEVK

SEQ ID NO: 30285 - protein, 14 aa, Artificial Sequence
  Synthetic polypeptide
LLEGEECRNLASKK

SEQ ID NO: 30286 - protein, 22 aa, Artificial Sequence
  Synthetic polypeptide
PGMMAHACNPSTLGGRGGWIMR

SEQ ID NO: 30287 - protein, 11 aa, Artificial Sequence
  Synthetic polypeptide
LFPGQPMVSNK

SEQ ID NO: 30288 - protein, 21 aa, Artificial Sequence
  Synthetic polypeptide
TAPPLSPLADSLCGLSPPAPR

SEQ ID NO: 30289 - protein, 18 aa, Artificial Sequence
  Synthetic polypeptide
NLHQSNFSLSGEAKYPPR

SEQ ID NO: 30290 - protein, 12 aa, Artificial Sequence
  Synthetic polypeptide
SCIFTISKIDDR

SEQ ID NO: 30291 - protein, 16 aa, Artificial Sequence
  Synthetic polypeptide
LHELMERTIFLITQIR

SEQ ID NO: 30292 - protein, 19 aa, Artificial Sequence
  Synthetic polypeptide
EAEAGESLESDAVKQAMQK

SEQ ID NO: 30293 - protein, 9 aa, Artificial Sequence
  Synthetic polypeptide
KKADATLLK

SEQ ID NO: 30294 - protein, 20 aa, Artificial Sequence
  Synthetic polypeptide
MVEGDQLPPGHTVSQYETCK

SEQ ID NO: 30295 - protein, 26 aa, Artificial Sequence
  Synthetic polypeptide
VCNKNFDDEDSVDGNRPSSASSTSSK

SEQ ID NO: 30296 - protein, 15 aa, Artificial Sequence
  Synthetic polypeptide
MLETLTLISSLGGLR

SEQ ID NO: 30297 - protein, 19 aa, Artificial Sequence
  Synthetic polypeptide
STNVLCTLFMLNLPDLEEK

SEQ ID NO: 30298 - protein, 28 aa, Artificial Sequence
  Synthetic polypeptide
QEQSSSPAMEQSWMENDFDKLTELGFRR

SEQ ID NO: 30299 - protein, 7 aa, Artificial Sequence
  Synthetic polypeptide
MILSSIR

SEQ ID NO: 30300 - protein, 24 aa, Artificial Sequence
  Synthetic polypeptide
MGAVAQACNPSTLGGQGKPAPEIR

SEQ ID NO: 30301 - protein, 22 aa, Artificial Sequence
  Synthetic polypeptide
YVLAAPEWTEEDLSQLTRSMVK

SEQ ID NO: 30302 - protein, 14 aa, Artificial Sequence
  Synthetic polypeptide
HPSFRPAMTVWVGK

SEQ ID NO: 30303 - protein, 20 aa, Artificial Sequence
  Synthetic polypeptide
ALEPGRGSEEAKCSITSCTR

SEQ ID NO: 30304 - protein, 8 aa, Artificial Sequence
  Synthetic polypeptide
QVLQHPWK

SEQ ID NO: 30305 - protein, 11 aa, Artificial Sequence
  Synthetic polypeptide
SLRPAATPSGK

SEQ ID NO: 30306 - protein, 12 aa, Artificial Sequence
  Synthetic polypeptide
HRRQISTAMPVK

SEQ ID NO: 30307 - protein, 25 aa, Artificial Sequence
  Synthetic polypeptide
TSSGLPLILHYAMTETPLSMCLWEK

SEQ ID NO: 30308 - protein, 13 aa, Artificial Sequence
  Synthetic polypeptide
LLDASQFGRMITR

SEQ ID NO: 30309 - protein, 14 aa, Artificial Sequence
  Synthetic polypeptide
SQHFGRPRQVDYLR

SEQ ID NO: 30310 - protein, 13 aa, Artificial Sequence
  Synthetic polypeptide
IQNSQVGIAVQQK

SEQ ID NO: 30311 - protein, 11 aa, Artificial Sequence
  Synthetic polypeptide
QPPRPNQLCRR

SEQ ID NO: 30312 - protein, 16 aa, Artificial Sequence
  Synthetic polypeptide
LQAEYMAASLGHGGPR

SEQ ID NO: 30313 - protein, 7 aa, Artificial Sequence
  Synthetic polypeptide
DTVDVLK

SEQ ID NO: 30314 - protein, 12 aa, Artificial Sequence
  Synthetic polypeptide
AASNQISGVPSR

SEQ ID NO: 30315 - protein, 11 aa, Artificial Sequence
  Synthetic polypeptide
LSWRGSGKITK

SEQ ID NO: 30316 - protein, 16 aa, Artificial Sequence
  Synthetic polypeptide
QELSILTMQVPPCSPR

SEQ ID NO: 30317 - protein, 11 aa, Artificial Sequence
  Synthetic polypeptide
LSCAASGFTVK

SEQ ID NO: 30318 - protein, 24 aa, Artificial Sequence
  Synthetic polypeptide
QAPGQGLEWMGGIIPIFGTRNYRK

SEQ ID NO: 30319 - protein, 13 aa, Artificial Sequence
  Synthetic polypeptide
VCTWTPFNPVTVR

SEQ ID NO: 30320 - protein, 9 aa, Artificial Sequence
  Synthetic polypeptide
RATKPTVQK

SEQ ID NO: 30321 - protein, 9 aa, Artificial Sequence
  Synthetic polypeptide
MTSQTMVNK

SEQ ID NO: 30322 - protein, 9 aa, Artificial Sequence
  Synthetic polypeptide
RTHQQAPLK

SEQ ID NO: 30323 - protein, 9 aa, Artificial Sequence
  Synthetic polypeptide
VAAAESHPL

SEQ ID NO: 30324 - protein, 9 aa, Artificial Sequence
  Synthetic polypeptide
GIRPPTSVR

SEQ ID NO: 30325 - protein, 9 aa, Artificial Sequence
  Synthetic polypeptide
AQMSVPFNR

SEQ ID NO: 30326 - protein, 9 aa, Artificial Sequence
  Synthetic polypeptide
SLSPPLVSK

SEQ ID NO: 30327 - protein, 9 aa, Artificial Sequence
  Synthetic polypeptide
AVNGKFVGR

SEQ ID NO: 30328 - protein, 9 aa, Artificial Sequence
  Synthetic polypeptide
IQNEIHAQR

SEQ ID NO: 30329 - protein, 9 aa, Artificial Sequence
  Synthetic polypeptide
RLDHQRAEK

SEQ ID NO: 30330 - protein, 10 aa, Artificial Sequence
  Synthetic polypeptide
RWKEVPSVPR

SEQ ID NO: 30331 - protein, 10 aa, Artificial Sequence
  Synthetic polypeptide
GVQQYHLLSW

SEQ ID NO: 30332 - protein, 9 aa, Artificial Sequence
  Synthetic polypeptide
RLATAPSEK

SEQ ID NO: 30333 - protein, 10 aa, Artificial Sequence
  Synthetic polypeptide
YLPDFYFGKF

SEQ ID NO: 30334 - protein, 8 aa, Artificial Sequence
  Synthetic polypeptide
TVKTKSLM

SEQ ID NO: 30335 - protein, 9 aa, Artificial Sequence
  Synthetic polypeptide
HSKALSLSK

SEQ ID NO: 30336 - protein, 10 aa, Artificial Sequence
  Synthetic polypeptide
KTKNLPMQEK

SEQ ID NO: 30337 - protein, 10 aa, Artificial Sequence
  Synthetic polypeptide
KTKDLDQFLK

SEQ ID NO: 30338 - protein, 10 aa, Artificial Sequence
  Synthetic polypeptide
GGGYNDFGNY

SEQ ID NO: 30339 - protein, 8 aa, Artificial Sequence
  Synthetic polypeptide
TEIILRIK

SEQ ID NO: 30340 - protein, 9 aa, Artificial Sequence
  Synthetic polypeptide
RMFWIPKTK

SEQ ID NO: 30341 - protein, 10 aa, Artificial Sequence
  Synthetic polypeptide
VWMRSPLSTF

SEQ ID NO: 30342 - protein, 10 aa, Artificial Sequence
  Synthetic polypeptide
LPDLAGLAHL

SEQ ID NO: 30343 - protein, 9 aa, Artificial Sequence
  Synthetic polypeptide
KVLGDVATK

SEQ ID NO: 30344 - protein, 9 aa, Artificial Sequence
  Synthetic polypeptide
MVKPPSLLK

SEQ ID NO: 30345 - protein, 11 aa, Artificial Sequence
  Synthetic polypeptide
ESFYGIGTTRW

SEQ ID NO: 30346 - protein, 9 aa, Artificial Sequence
  Synthetic polypeptide
SIKQLQLLK

SEQ ID NO: 30347 - protein, 9 aa, Artificial Sequence
  Synthetic polypeptide
SVVSVLVQK

SEQ ID NO: 30348 - protein, 10 aa, Artificial Sequence
  Synthetic polypeptide
ALRAVTLTAK

SEQ ID NO: 30349 - protein, 10 aa, Artificial Sequence
  Synthetic polypeptide
YLMPSQLWKA

SEQ ID NO: 30350 - protein, 9 aa, Artificial Sequence
  Synthetic polypeptide
EQLDILENI

SEQ ID NO: 30351 - protein, 10 aa, Artificial Sequence
  Synthetic polypeptide
RSPDHPRAEY

SEQ ID NO: 30352 - protein, 10 aa, Artificial Sequence
  Synthetic polypeptide
ITSWFVPRPW

SEQ ID NO: 30353 - protein, 9 aa, Artificial Sequence
  Synthetic polypeptide
NELDKFIVF

SEQ ID NO: 30354 - protein, 9 aa, Artificial Sequence
  Synthetic polypeptide
SHKASLNKF

SEQ ID NO: 30355 - protein, 9 aa, Artificial Sequence
  Synthetic polypeptide
GTVPKSKAL

SEQ ID NO: 30356 - protein, 12 aa, Artificial Sequence
  Synthetic polypeptide
FMMEQVGLAIRS

SEQ ID NO: 30357 - protein, 9 aa, Artificial Sequence
  Synthetic polypeptide
MELALRSQL

SEQ ID NO: 30358 - protein, 12 aa, Artificial Sequence
  Synthetic polypeptide
RVLLKEELTTPK

SEQ ID NO: 30359 - protein, 9 aa, Artificial Sequence
  Synthetic polypeptide
PSSPRPSSL

SEQ ID NO: 30360 - protein, 12 aa, Artificial Sequence
  Synthetic polypeptide
GSGKRTSSQLKP

SEQ ID NO: 30361 - protein, 9 aa, Artificial Sequence
  Synthetic polypeptide
STSYSISSK

SEQ ID NO: 30362 - protein, 10 aa, Artificial Sequence
  Synthetic polypeptide
RTQSSTIQIR

SEQ ID NO: 30363 - protein, 9 aa, Artificial Sequence
  Synthetic polypeptide
QEDLGQRGY

SEQ ID NO: 30364 - protein, 9 aa, Artificial Sequence
  Synthetic polypeptide
ETEKDRRPW

SEQ ID NO: 30365 - protein, 11 aa, Artificial Sequence
  Synthetic polypeptide
RRLQGATAMVR

SEQ ID NO: 30366 - protein, 11 aa, Artificial Sequence
  Synthetic polypeptide
WRFQSCPPTTY

SEQ ID NO: 30367 - protein, 10 aa, Artificial Sequence
  Synthetic polypeptide
AVMTEVVLSK

SEQ ID NO: 30368 - protein, 8 aa, Artificial Sequence
  Synthetic polypeptide
STSIYSTL

SEQ ID NO: 30369 - protein, 9 aa, Artificial Sequence
  Synthetic polypeptide
APKRNTSAL

SEQ ID NO: 30370 - protein, 9 aa, Artificial Sequence
  Synthetic polypeptide
RSVSARPPR

SEQ ID NO: 30371 - protein, 10 aa, Artificial Sequence
  Synthetic polypeptide
SVAWPFSFPK

SEQ ID NO: 30372 - protein, 8 aa, Artificial Sequence
  Synthetic polypeptide
TPNLRTIY

SEQ ID NO: 30373 - protein, 9 aa, Artificial Sequence
  Synthetic polypeptide
SIQHSDLLY

SEQ ID NO: 30374 - protein, 10 aa, Artificial Sequence
  Synthetic polypeptide
SVKQGTGTSW

SEQ ID NO: 30375 - protein, 10 aa, Artificial Sequence
  Synthetic polypeptide
KSQKLREQIK

SEQ ID NO: 30376 - protein, 9 aa, Artificial Sequence
  Synthetic polypeptide
RRQQLITRF

SEQ ID NO: 30377 - protein, 8 aa, Artificial Sequence
  Synthetic polypeptide
KSQLLERL

SEQ ID NO: 30378 - protein, 9 aa, Artificial Sequence
  Synthetic polypeptide
GLFFMKQSV

SEQ ID NO: 30379 - protein, 9 aa, Artificial Sequence
  Synthetic polypeptide
RENGFVKKF

SEQ ID NO: 30380 - protein, 14 aa, Artificial Sequence
  Synthetic polypeptide
NEQAALSEAKVGGS

SEQ ID NO: 30381 - protein, 8 aa, Artificial Sequence
  Synthetic polypeptide
HELQSHHF

SEQ ID NO: 30382 - protein, 8 aa, Artificial Sequence
  Synthetic polypeptide
NEIRISEA

SEQ ID NO: 30383 - protein, 10 aa, Artificial Sequence
  Synthetic polypeptide
APRMLPIQAV

SEQ ID NO: 30384 - protein, 8 aa, Artificial Sequence
  Synthetic polypeptide
EAEVARWL

SEQ ID NO: 30385 - protein, 10 aa, Artificial Sequence
  Synthetic polypeptide
RLCPAAPSEK

SEQ ID NO: 30386 - protein, 11 aa, Artificial Sequence
  Synthetic polypeptide
APRGPSGTQEM

SEQ ID NO: 30387 - protein, 10 aa, Artificial Sequence
  Synthetic polypeptide
STHPPPPSGL

SEQ ID NO: 30388 - protein, 15 aa, Artificial Sequence
  Synthetic polypeptide
LYSRYKKLQQHSGAK

SEQ ID NO: 30389 - protein, 10 aa, Artificial Sequence
  Synthetic polypeptide
AAAVNQGLSY

SEQ ID NO: 30390 - protein, 10 aa, Artificial Sequence
  Synthetic polypeptide
LWPSPVNLRF

SEQ ID NO: 30391 - protein, 10 aa, Artificial Sequence
  Synthetic polypeptide
VSLSPPLVSK

SEQ ID NO: 30392 - protein, 9 aa, Artificial Sequence
  Synthetic polypeptide
VAAAAARVL

SEQ ID NO: 30393 - protein, 9 aa, Artificial Sequence
  Synthetic polypeptide
WRTSALGQR

SEQ ID NO: 30394 - protein, 11 aa, Artificial Sequence
  Synthetic polypeptide
KYKLLDIGYRK

SEQ ID NO: 30395 - protein, 8 aa, Artificial Sequence
  Synthetic polypeptide
KFTRFFVK

SEQ ID NO: 30396 - protein, 9 aa, Artificial Sequence
  Synthetic polypeptide
LHQKGGITF

SEQ ID NO: 30397 - protein, 9 aa, Artificial Sequence
  Synthetic polypeptide
QPSQTQVPL

SEQ ID NO: 30398 - protein, 9 aa, Artificial Sequence
  Synthetic polypeptide
ETFPGKSTF

SEQ ID NO: 30399 - protein, 9 aa, Artificial Sequence
  Synthetic polypeptide
DVLDKFMSF

SEQ ID NO: 30400 - protein, 9 aa, Artificial Sequence
  Synthetic polypeptide
GRWITPSNR

SEQ ID NO: 30401 - protein, 9 aa, Artificial Sequence
  Synthetic polypeptide
SAALQALKR

SEQ ID NO: 30402 - protein, 9 aa, Artificial Sequence
  Synthetic polypeptide
TATQRPTPM

SEQ ID NO: 30403 - protein, 9 aa, Artificial Sequence
  Synthetic polypeptide
RLLVPSSPK

SEQ ID NO: 30404 - protein, 9 aa, Artificial Sequence
  Synthetic polypeptide
TEATVDTSF

SEQ ID NO: 30405 - protein, 8 aa, Artificial Sequence
  Synthetic polypeptide
LASREAIL

SEQ ID NO: 30406 - protein, 8 aa, Artificial Sequence
  Synthetic polypeptide
HDLVRISM

SEQ ID NO: 30407 - protein, 12 aa, Artificial Sequence
  Synthetic polypeptide
NPQFLISMILQR

SEQ ID NO: 30408 - protein, 10 aa, Artificial Sequence
  Synthetic polypeptide
MRATKPTVQK

SEQ ID NO: 30409 - protein, 9 aa, Artificial Sequence
  Synthetic polypeptide
SAAAGIVGR

SEQ ID NO: 30410 - protein, 9 aa, Artificial Sequence
  Synthetic polypeptide
HTMGFWLTK

SEQ ID NO: 30411 - protein, 10 aa, Artificial Sequence
  Synthetic polypeptide
SPRDEGKVFR

SEQ ID NO: 30412 - protein, 10 aa, Artificial Sequence
  Synthetic polypeptide
QALYCQLLTY

SEQ ID NO: 30413 - protein, 9 aa, Artificial Sequence
  Synthetic polypeptide
GTFPFAFSL

SEQ ID NO: 30414 - protein, 10 aa, Artificial Sequence
  Synthetic polypeptide
KTFPLSKSPK

SEQ ID NO: 30415 - protein, 10 aa, Artificial Sequence
  Synthetic polypeptide
KVLEKYWLYK

SEQ ID NO: 30416 - protein, 8 aa, Artificial Sequence
  Synthetic polypeptide
TTDAAIRY

SEQ ID NO: 30417 - protein, 10 aa, Artificial Sequence
  Synthetic polypeptide
QAQPTLRPPK

SEQ ID NO: 30418 - protein, 9 aa, Artificial Sequence
  Synthetic polypeptide
AQPTLRPPK

SEQ ID NO: 30419 - protein, 8 aa, Artificial Sequence
  Synthetic polypeptide
KPAVARAR

SEQ ID NO: 30420 - protein, 10 aa, Artificial Sequence
  Synthetic polypeptide
ESFYGIGTTR

SEQ ID NO: 30421 - protein, 11 aa, Artificial Sequence
  Synthetic polypeptide
RRNQETGAVQR

SEQ ID NO: 30422 - protein, 12 aa, Artificial Sequence
  Synthetic polypeptide
ATDNDFSRRNLY

SEQ ID NO: 30423 - protein, 9 aa, Artificial Sequence
  Synthetic polypeptide
EVVSTSYRR

SEQ ID NO: 30424 - protein, 11 aa, Artificial Sequence
  Synthetic polypeptide
KLRDPTDSTLR

SEQ ID NO: 30425 - protein, 10 aa, Artificial Sequence
  Synthetic polypeptide
SPSADRVVAL

SEQ ID NO: 30426 - protein, 12 aa, Artificial Sequence
  Synthetic polypeptide
KVSSPESGLSNR

SEQ ID NO: 30427 - protein, 9 aa, Artificial Sequence
  Synthetic polypeptide
DIISAFHPF

SEQ ID NO: 30428 - protein, 10 aa, Artificial Sequence
  Synthetic polypeptide
AVFSLRPIPR

SEQ ID NO: 30429 - protein, 9 aa, Artificial Sequence
  Synthetic polypeptide
GRFPSQAQL

SEQ ID NO: 30430 - protein, 9 aa, Artificial Sequence
  Synthetic polypeptide
DIFQQQISR

SEQ ID NO: 30431 - protein, 9 aa, Artificial Sequence
  Synthetic polypeptide
SVSATSVQK

SEQ ID NO: 30432 - protein, 9 aa, Artificial Sequence
  Synthetic polypeptide
VHCDPTKGF

SEQ ID NO: 30433 - protein, 10 aa, Artificial Sequence
  Synthetic polypeptide
IVQHTEISSK

SEQ ID NO: 30434 - protein, 51 aa, Artificial Sequence
  Synthetic polypeptide
ARGGSGRCVARAMTGNAGEWCLMESDPGVFTELIKGFGPSTMLGTQKIFGK

SEQ ID NO: 30435 - protein, 39 aa, Artificial Sequence
  Synthetic polypeptide
MTGNAGEWCLMESDPGVFTELIKGFGPSTMLGTQKIFGK

SEQ ID NO: 30436 - protein, 29 aa, Artificial Sequence
  Synthetic polypeptide
MGWRAAGALLLALLLHGRLLALLDVLKHT

SEQ ID NO: 30437 - protein, 520 aa, Artificial Sequence; identical to SEQ ID NO: 403
  Synthetic polypeptide

SEQ ID NO: 30438 - protein, 501 aa, Artificial Sequence; identical to SEQ ID NO: 402
  Synthetic polypeptide

SEQ ID NO: 30439 - protein, 533 aa, Artificial Sequence; identical to SEQ ID NO: 404
  Synthetic polypeptide

SEQ ID NO: 30440 - protein, 464 aa, Artificial Sequence; identical to SEQ ID NO: 394
  Synthetic polypeptide

SEQ ID NO: 30441 - protein, 541 aa, Artificial Sequence; identical to SEQ ID NO: 400
  Synthetic polypeptide

SEQ ID NO: 30442 - protein, 543 aa, Artificial Sequence; identical to SEQ ID NO: 405
  Synthetic polypeptide

SEQ ID NO: 30443 - protein, 21 aa, Artificial Sequence
  Synthetic polypeptide
MDLVQVSGSLGSPVLSCKVRI

SEQ ID NO: 30444 - protein, 141 aa, Artificial Sequence
  Synthetic polypeptide
MGLGQPQAWLLGLPTAVVYGSLALFTTILHNVFLLYYVDTFVSVYKINKMAFWVGETVFLLWNSLNDPLFGWLSDRQFLSSQPRLCGEELLVGSEEADSITLGRYLRQLARHRNFLWFVSMDLVQVSGSLGSPVLSCKVRI

SEQ ID NO: 30445 - protein, 292 aa, Artificial Sequence
  Synthetic polypeptide
MGLGQPQAWLLGLPTAVVYGSLALFTTILHNVFLLYYVDTFVSVYKINKMAFWVGETVFLLWNSLNDPLFGWLSDRQFLSSQPRSGAGLSSRAVVLARVQALGWHGPLLALSFLAFWVPWAPAGLQFLLCLCLYDGFLTLVDLHHHALLADLALSAHDRTHLNFYCSLFSAAGSLSVFASYAFWNKEDFSSFRAFCVTLAVSSGLGFLGATQLLRRRVEAARKDPGCSGLVVDSGLCGEELLVGSEEADSITLGRYLRQLARHRNFLWFVSMDLVQVSGSLGSPVLSCKVRI

SEQ ID NO: 30446 - protein, 853 aa, Artificial Sequence
  Synthetic polypeptide
MVLAAAMSQDADPSGPEQPDRVACSVPGARASPAPSGPRGMQQPPPPPQPPPPPQAGLPQIIQNAAKLLDKNPFSVSNPNPLLPSPASLQLAQLQAQLTLHRLKLAQTAVTNNTAAATVLNQVLSKVAMSQPLFNQLRHPSVITGPHGHAGVPQHAAAIPSTRFPSNAIAFSPPSQTRGPGPSMNLPNQPPSAMVMHPFTGVMPQTPGQPAVILGIGKTGPAPATAGFYEYGKASSGQTYGPETDGQPGFLPSSASTSGSVTYEGHYSHTGQDGQAAFSKDFYGPNSQGSHVASGFPAEQAGGLKSEVGPLLQGTNSQWESPHGFSGQSKPDLTAGPMWPPPHNQPYELYDPEEPTSDRTPPSFGGRLNNSKQGFIGAGRRAKEDQALLSVRPLQAHELNDFHGVAPLHLPHICSICDKKVFDLKDWELHVKGKLHAQKCLVFSENAGIRCILGSAEGTLCASPNSTAVYNPAGNEDYASNLGTSYVPIPARSFTQSSPTFPLASVGTTFAQRKGAGRVVHICNLPEGSCTENDVINLGLPFGKVTNYILMKSTNQAFLEMAYTEAAQAMVQYYQEKSAVINGEKLLIRMSKRYKELQLKKPGKAVAAIIQDIHSQRERDMFREADRYGPERPRSRSPVSRSLSPRSHTPSFTSCSSSHSPPGPSRADWGNGRDSWEHSPYARREEERDPAPWRDNGDDKRDRMDPWAHDRKHHPRQLDKAELDERPEGGRPHREKYPRSGSPNLPHSVSSYKSREDGYYRKEPKAKWDKYLKQQQDAPGRSRRKDEARLRESRHPHPDDSGKEDGLGPKVTRAPEGAKAKQNEKNKTKRTDRDQEGADDRKENTMAENELQV

SEQ ID NO: 30447 - protein, 321 aa, Artificial Sequence
  Synthetic polypeptide
MKKEHVLHCQFSAWYPFFRGVTIKSVILPLPQNVKDYLLDDGTLVVSGRDDPPTHSQPDSDDEAEEIQWSDDENTATLTAPEFPEFATKVQEAINSLGGSVFPKLNWSAPRDAYWIAMNSSLKCKTLSDIFLLFKSSDFITRDFTQPFIHCTDDSPDPCIEYELVLRKWCELIPGAEFRCFVKENKLIGISQRDYTQYYDHISKQKEEIRRCIQDFFKKHIQYKFLDEDFVFDIYRDSRALYRGDEAKMRPSKWVLIQYEGVLIRRGNLDTKTPGMPKRRGKATSRTQQEGGHLHTVERDLRNAPCRHPDLGLPASRTVRQ

SEQ ID NO: 30448 - protein, 280 aa, Artificial Sequence
  Synthetic polypeptide
MKKEHVLHCQFSAWYPFFRGVTIKSVILPLPQNVKDYLLDDGTLVVSGRDDPPTHSQPDSDDEAEEIQWSDDENTATLTAPEFPEFATKVQEAINSLGGSVFPKLNWSAPRDAYWIAMNSSLKCKTLSDIFLLFKSSDFITRDFTQPFIHCTDDSPDPCIEYELVLRKWCELIPGAEFRCFVKENKLIVVFDIYRDSRALYRGDEAKMRPSKWVLIQYEGVLIRRGNLDTKTPGMPKRRGKATSRTQQEGGHLHTVERDLRNAPCRHPDLGLPASRTVRQ

SEQ ID NO: 30449 - protein, 175 aa, Artificial Sequence
  Synthetic polypeptide
  misc_feature (1)..(1): Xaa can be any naturally occurring amino acid
XFIHCTDDSPDPCIEYELVLRKWCELIPGAEFRCFVKENKLIGISQRDYTQYYDHISKQKEEIRRCIQDFFKKHIQYKFLDEDFVFDIYRDSRALYRGDEAKMRPSKWVLIQYEGVLIRRGNLDTKTPGMPKRRGKATSRTQQEGGHLHTVERDLRNAPCRHPDLGLPASRTVRQ

SEQ ID NO: 30450 - protein, 302 aa, Artificial Sequence [sequence omitted]

SEQ ID NO: 30451 - protein, 283 aa, Artificial Sequence
  Synthetic polypeptide
MAYRRDEMWSEGRYEYERIPRERAPPRSHPSDESGYRWTRDDHSASRQPEYRDMRDGFRRKSFYSSHYARERSPYKRDNTFFRESPVGRKDSPHSRSGSSVSSRSYSPERSKSYSFHQSQHRNKERPVQSLKTSRDTSPSSGSAVSSSKVLDKPSRLTEKELAEAASKWAAEKLEKSDESNLPEISEYEAGSTAPLFTDQPEEPESNTTHGIELFEDSQLTTRSKAIASKTKEIEQVYRQDCETFGMVVKMLIEKDPSLEKSIQFALRQNLHEIGLWRSVCTE

SEQ ID NO: 30452 - protein, 357 aa, Artificial Sequence [sequence omitted]

SEQ ID NO: 30453 - protein, 368 aa, Artificial Sequence
  Synthetic polypeptide
MLRHPVRSLVQVAYRRDEMWSEGRYEYERIPRERAPPRSHPSDGYNRLVNIVPKKPPLLDRPGEGSYNRYYSHVDYRDYDEGRSFSHDRRSGPPHRGDESGYRWTRDDHSASRQPEYRDMRDGFRRKSFYSSHYARERSPYKRDNTFFRESPVGRKDSPHSRSGSSVSSRSYSPERSKSYSFHQSQHRKSVRPGASYKRQNEGNPERDKERPVQSLKTSRDTSPSSGSAVSSSKVLDKPSRLTEKELAEAASKWAAEKLEKSDESNLPEISEYEAGSTAPLFTDQPEEPESNTTHGIELFEDSQLTTRSKAIASKTKEIEQVYRQDCETFGMVVKMLIEKDPSLEKSIQFALRQNLHEIGLWRSVCTE

SEQ ID NO: 30454 - protein, 230 aa, Artificial Sequence
  Synthetic polypeptide
MRDGFRRKSFYSSHYARERSPYKRDNTFFRESPVGRKDSPHSRSGSSVSSRSYSPERSKSYSFHQSQHRNKERPVQSLKTSRDTSPSSGSAVSSSKVLDKPSRLTEKELAEAASKWAAEKLEKSDESNLPEISEYEAGSTAPLFTDQPEEPESNTTHGIELFEDSQLTTRSKAIASKTKEIEQVYRQDCETFGMVVKMLIEKDPSLEKSIQFALRQNLHEIGLWRSVCTE

SEQ ID NO: 30455 - protein, 295 aa, Artificial Sequence
  Synthetic polypeptide
MWSEGRYEYERIPRERAPPRSHPSDESGYRWTRDDHSASRQPEYRDMRDGFRRKSFYSSHYARERSPYKRDNTFFRESPVGRKDSPHSRSGSSVSSRSYSPERSKSYSFHQSQHRKSVRPGASYKRQNEGNPERDKERPVQSLKTSRDTSPSSGSAVSSSKVLDKPSRLTEKELAEAASKWAAEKLEKSDESNLPEISEYEAGSTAPLFTDQPEEPESNTTHGIELFEDSQLTTRSKAIASKTKEIEQVYRQDCETFGMVVKMLIEKDPSLEKSIQFALRQNLHEIGLWRSVCTE

SEQ ID NO: 30456 - protein, 350 aa, Artificial Sequence
  Synthetic polypeptide
MWSEGRYEYERIPRERAPPRSHPSDGYNRLVNIVPKKPPLLDRPGEGSYNRYYSHVDYRDYDEGRSFSHDRRSGPPHRGDESGYRWTRDDHSASRQPEYRDMRDGFRRKSFYSSHYARERSPYKRDNTFFRESPVGRKDSPHSRSGSSVSSRSYSPERSKSYSFHQSQHRKSVRPGASYKRQNEGNPERDKERPVQSLKTSRDTSPSSGSAVSSSKVLDKPSRLTEKELAEAASKWAAEKLEKSDESNLPEISEYEAGSTAPLFTDQPEEPESNTTHGIELFEDSQLTTRSKAIASKTKEIEQVYRQDCETFGMVVKMLIEKDPSLEKSIQFALRQNLHEIGLWRSVCTE

SEQ ID NO: 30457 - protein, 331 aa, Artificial Sequence
  Synthetic polypeptide
MWSEGRYEYERIPRERAPPRSHPSDGYNRLVNIVPKKPPLLDRPGEGSYNRYYSHVDYRDYDEGRSFSHDRRSGPPHRGDESGYRWTRDDHSASRQPEYRDMRDGFRRKSFYSSHYARERSPYKRDNTFFRESPVGRKDSPHSRSGSSVSSRSYSPERSKSYSFHQSQHRNKERPVQSLKTSRDTSPSSGSAVSSSKVLDKPSRLTEKELAEAASKWAAEKLEKSDESNLPEISEYEAGSTAPLFTDQPEEPESNTTHGIELFEDSQLTTRSKAIASKTKEIEQVYRQDCETFGMVVKMLIEKDPSLEKSIQFALRQNLHEIGLWRSVCTE

SEQ ID NO: 30458 - protein, 22 aa, Artificial Sequence
  Synthetic polypeptide
MLGAVAHNCDPSTLRGRGGRIT

SEQ ID NO: 30459 - protein, 78 aa, Artificial Sequence
  Synthetic polypeptide
MASSAEGDEGTVVALAGVLQSGFQELSLNKLATSLGASEQALRLIISIFLVHSPKAARVIRSCASPAQNPSGASIPGW

SEQ ID NO: 30460 - protein, 251 aa, Artificial Sequence; identical to SEQ ID NO: 1160
  Synthetic polypeptide

SEQ ID NO: 30461 - protein, 381 aa, Artificial Sequence
  Synthetic polypeptide
MKLLTRAGSFSRFYSLKVAPKVKATAAPAGAPPQPQDLEFTKLPNGLVIASLENYSPVSRIGLFIKAGSRYEDFSNLGTTHLLRLTSSLTTKGASSFKITRGIEAVGGKLSVTATRENMAYTVECLRGDVDILMEFLLNVTTAPEFRRWEVADLQPQLKIDKAVAFQNPQTHVIENLHAAAYRNALANPLYCPDYRIGKVTSEELHYFVQNHFTSARMALIGLGVSHPVLKQVAEQFLNMRGGLGLSGAKANYRGGEIREQNGDSLVHAAFVAESAVAGSAEANAFSVLQHVLGAGPHVKRGSNTTSHLHQAVAKATQQPFDVSAFNASYSDSGLFGIYTISQATAAGDVIKAAYNQVKTIAQGNLSNTDVQAAKRSCSYL

SEQ ID NO: 30462 - protein, 37 aa, Artificial Sequence
  Synthetic polypeptide
MAFSGSQAPYLSPDPKTRGAATPSVLVTAAPYPLAWG

SEQ ID NO: 30463 - protein, 72 aa, Artificial Sequence
  Synthetic polypeptide
MLLVPKAQGLVEMLQTIYETESCFSADGMSGREPSLEILPRTSLHSIPVTVGRRQRARRAGIKPWVLHLLSR

SEQ ID NO: 30464 - protein, 54 aa, Artificial Sequence
  Synthetic polypeptide
MNSPNESADGMSGREPSLEILPRTSLHSIPVTVGRRQRARRAGIKPWVLHLLSR

SEQ ID NO: 30465 - protein, 53 aa, Artificial Sequence
  Synthetic polypeptide
MNSPNESDGMSGREPSLEILPRTSLHSIPVTVGRRQRARRAGIKPWVLHLLSR

SEQ ID NO: 30466 - protein, 44 aa, Artificial Sequence
  Synthetic polypeptide
MSGREPSLEILPRTSLHSIPVTVGRRQRARRAGIKPWVLHLLSR

SEQ ID NO: 30467 - protein, 588 aa, Artificial Sequence; identical to SEQ ID NO: 1769
  Synthetic polypeptide

SEQ ID NO: 30468 - protein, 593 aa, Artificial Sequence; identical to SEQ ID NO: 1770
  Synthetic polypeptide

SEQ ID NO: 30469 - protein, 615 aa, Artificial Sequence; identical to SEQ ID NO: 1768
  Synthetic polypeptide

SEQ ID NO: 30470 - protein, 247 aa, Artificial Sequence; identical to SEQ ID NO: 1767
  Synthetic polypeptide

SEQ ID NO: 30471 - protein, 274 aa, Artificial Sequence; identical to SEQ ID NO: 1765
  Synthetic polypeptide

SEQ ID NO: 30472 - protein, 393 aa, Artificial Sequence; identical to SEQ ID NO: 1764
  Synthetic polypeptide

SEQ ID NO: 30473 - protein, 74 aa, Artificial Sequence
  Synthetic polypeptide
MNDSCIFRPETDSDIMELTDRIRVTCALNRCVDKNLHFPLCLFAKILTNVQVTPAATPAIQVLNLQLHILNPSF

SEQ ID NO: 30474 - protein, 131 aa, Artificial Sequence
  Synthetic polypeptide
MVLPQGLLTFRDVAIEFSQEEWKCLDPAQRTLYRDVMLENYRNLVSLGHDLILFFLFPRWSFCSCCPGWSAVAQSRLTTTSASRVQAILPPQPQKLLELQGLPLMPSRSWTVLLPSWLTATSLPDSPASAC

SEQ ID NO: 30475 - protein, 977 aa, Artificial Sequence
  Synthetic polypeptide
MMGDYRLPDHPQPMEILNLYLGDSLEPHPGECPRETCSHEDPPEPFEEQTWATDPPEPTRQNVPPWGSGVELTHLGSWVHQDGLEPCQEQTRATDPPESTRQDAPPWGSGVELTHLGSPSAQREHRQNTASPGSPVNSHLPGSPKQNRSTSTQVVFWAGILQAQMCVLDLEEELEKTEGLKAGLKCCLPTPPVDLPGDTGLHSSPPENEDSGEDSSEPEGEGQAWLREGTPDSSPQWGAEEESMFFSNPLFLASPCSENSASGECFSWGASDSHAGVRTGPESPATLEPPLPEDTVLWELESEPDLGDGAAISGHCTPPFPVPIYKPHSICWASVAAAEGAPAAPPGHGESEGDRLGPAPSAAPCVDEALTWESGCVGSDLGPAAHPVQPWASLSPEGWQRGGPFWPQVTLNSQDRDEREGGHPQESLPCTLAPCPWRSPASSPEPSSPESESRGPGPRPSPASSQEGSPQLQHHSSGILPKWTLDASQSSLLETDGEQPSSLKKKEAGEAPKPGEEVKSEGTARPAETGDVQPDIHLTSAEHENLRTPMNSSWLPGSPMPQAQSPEEGQRPPAGDKLANGVRNNKVAWNLASRLYRLEGFRKSEVAAYLQKNNDFSRAVAEEYLSFFQFGGQSLDRALRSFLQALVLSGETQERERILYQFSRRFHHCNPGIFPSVDSVHTLTCAIMLLNTDLHGQNIGKSMSCQEFITNLNGLRDGGNFPKELLKALYWSIRSEKLEWAVDEEDTARPEKAQPSLPAGKMSKPFLQLAQDPTVPTYKQGILARKMHQDADGKKTPWGKRGWKMFHTLLRGMVLYFLKQGEDHCLEGESLVGQMVDEPVGVHHSLATPATHYTKKPHVFQLRTADWRLYLFQAPTAKEMSSWIARINLAAATHSAPPFPAAVGSQRRFVRPILPVGPAQSSLEEQHRSHENCLDAAADDLLDLQRNLPERRGRGRELEEHRLRKEYLEYEDTAQRN

SEQ ID NO: 30476 - protein, 948 aa, Artificial Sequence
  Synthetic polypeptide
MMGDYRLPDHPQPMEILNLYLGDSLEPHPGECPRETCSHEDPPEPFEEQTWATDPPEPTRQNVPPWGSGVELTHLGSWVHQDGLEPCQEQTRATDPPESTRQDAPPWGSGVELTHLGSPSAQREHRQNTASPGSPVNSHLPGSPKQNRSTSTQVVFWAGILQAQMCVLDLEEELEKTEGLKAGLKCCLPTPPVDLPGDTGLHSSPPENEDSGEDSSEPEGEGQAWLREGTPDSSPQWGAEEESMFFSNPLFLASPCSENSASGECFSWGASDSHAGVRTGPESPATLEPPLPEDTVLWELESEPDLGDGAAISGHCTPPFPVPIYKPHSICWASVAAAEGAPAAPPGHGESEGDRLGPAPSAAPCVDEALTWESGCVGSDLGPAAHPVQPWASLSPEGWQRGGPFWPQVTLNSQDREPSSPESESRGPGPRPSPASSQEGSPQLQHHSSGILPKWTLDASQSSLLETDGEQPSSLKKKEAGEAPKPGEEVKSEGTARPAETGDVQPDIHLTSAEHENLRTPMNSSWLPGSPMPQAQSPEEGQRPPAGDKLANGVRNNKVAWNLASRLYRLEGFRKSEVAAYLQKNNDFSRAVAEEYLSFFQFGGQSLDRALRSFLQALVLSGETQERERILYQFSRRFHHCNPGIFPSVDSVHTLTCAIMLLNTDLHGQNIGKSMSCQEFITNLNGLRDGGNFPKELLKALYWSIRSEKLEWAVDEEDTARPEKAQPSLPAGKMSKPFLQLAQDPTVPTYKQGILARKMHQDADGKKTPWGKRGWKMFHTLLRGMVLYFLKGEDHCLEGESLVGQMVDEPVGVHHSLATPATHYTKKPHVFQLRTADWRLYLFQAPTAKEMSSWIARINLAAATHSAPPFPAAVGSQRRFVRPILPVGPAQSSLEEQHRSHENCLDAAADDLLDLQRNLPERRGRGRELEEHRLRKEYLEYEDTAQRN

SEQ ID NO: 30477 - protein, 38 aa, Artificial Sequence
  Synthetic polypeptide
MNPVYSPGSSGVPYANAKGIGYPAWAMKVKLCLKRRQR

SEQ ID NO: 30478 - protein, 188 aa, Artificial Sequence
  Synthetic polypeptide
MPIPASPLHPPLPSLLLYLLLELAGVTHVFHVQQTEMSQTVSTGESIILSCSVPNTLPNGPVLWFKGTGPNRKLIYNFKQGNFPRVKEIGDTTKPGNTDFSTRIREISLADAGTYYCVKFIKGRAIKEYQSGRGTQVFVTGYTPWQRRGINCTKIIHPVTQQLYKQMTITSLGGCEEDQYPEFLQCII

SEQ ID NO: 30479 - protein, 15 aa, Artificial Sequence
  Synthetic polypeptide
MGTVAHACNPCTLGG

SEQ ID NO: 30480 - protein, 13 aa, Artificial Sequence
  Synthetic polypeptide
MASICPFLKQWLN

SEQ ID NO: 30481 - protein, 356 aa, Artificial Sequence
  Synthetic polypeptide
MKKKLVVLGLLAVVLVLVIVGLCLWLPSASKEPDNHVYTRAAVAADAKQCSKIGRDALRDGGSAVDAAIAALLCVGLMNAHSMGIGGGLFLTIYNSTTRKAEVINAREVAPRLAFATMFNSSEQSQKGGLSVAVPGEIRGYELAHQRHGRLPWARLFQPSIQLARQGFPVGKGLAAALENKRTVIEQQPVLCEVFCRDRKVLREGERLTLPQLADTYETLAIEGAQAFYNGSLTAQIVKDIQAAGGIVTAEDLNNYRAELIEHPLNISLGDVVLYMPSAPLSGPVLALILNILKGYNFSRESVESPEQKGLTYHRIVEAFRFAYAKRTLLGDPKFVDVTECQACSANSRNIFCMKE

SEQ ID NO: 30482 - protein, 283 aa, Artificial Sequence
  Synthetic polypeptide
MQCRLPRGLAGALLTLLCMGLLCLRYHLNLSPQRVQGTPELSQPNPGPPKLQLHDVFIAVKTTRAFHRLRLELLLDTWVSRTREQTFVFTDSPDKGLQERLGSHLVVTNCSAEHSHPALSCKMAAEFDTFLASGLRWFCHVDDDNYVNPRALLQLLRAFPLARDVYVGRPSLNRPIHASEPQPHNRTRLVQFWFATGGAGFCINRKLALKMAPWASGSRFMDTSALIRLPDDCTMGYIIECKLGGRLQPSPLFHSHLETLQLLRTAQLPEQLMTWHSRSSTNI

SEQ ID NO: 30483 - protein, 269 aa, Artificial Sequence
  Synthetic polypeptide
MQCRLPRGLAGALLTLLCMGLLCLRYHLNLSPQRVQGTPELSQPNPGPPKLQLHDVFIAVKTTRAFHRLRLELLLDTWVSRTREQVTRSHLVVTNCSAEHSHPALSCKMAAEFDTFLASGLRWFCHVDDDNYVNPRALLQLLRAFPLARDVYVGRPSLNRPIHASEPQPHNRTRLVQFWFATGGAGFCINRKLALKMAPWASGSRFMDTSALIRLPDDCTMGYIIECKLGGRLQPSPLFHSHLETLQLLRTAQLPEQLMTWHSRSSTNI

SEQ ID NO: 30484 - protein, 30 aa, Artificial Sequence
  Synthetic polypeptide
  misc_feature (1)..(1): Xaa can be any naturally occurring amino acid
XSHLETLQLLRTAQLPEQLMTWHSRSSTNI

SEQ ID NO: 30485 - protein, 45 aa, Artificial Sequence
  Synthetic polypeptide
MKEGRLEESVALRIITEGASILRQEKNLLDIDAPVTGWQELKMPF

SEQ ID NO: 30486 - protein, 95 aa, Artificial Sequence
  Synthetic polypeptide
MSEPKAIDPKLSTTDRVVKAVPFPPSHRLTAKEVFDNDGKPRVDILKAHLMKEGRLEESVALRIITEGASILRQEKNLLDIDAPVTGWQELKMPF

SEQ ID NO: 30487 - protein, 105 aa, Artificial Sequence
  Synthetic polypeptide
MALDVKSRAKRYEKLDFLGEGQFATVYKARDKNTNQIVAIKKIKLGHRSEAKDGINRTALREIKLLQELSHPNIIGLLDAFGHKSNISLVFDFMETDLECSDSRL

SEQ ID NO: 30488 - protein, 12 aa, Artificial Sequence
  Synthetic polypeptide
METDLECSDSRL

SEQ ID NO: 30489 - protein, 2494 aa, Artificial Sequence
  Synthetic polypeptide
MPGAAGVLLLLLLSGGLGGVQAQRPQQQRQSQAHQQRGLFPAVLNLASNALITTNATCGEKGPEMYCKLVEHVPGQPVRNPQCRICNQNSSNPNQRHPITNAIDGKNTWWQSPSIKNGIEYHYVTITLDLQQVFQIAYVIVKAANSPRPGNWILERSLDDVEYKPWQYHAVTDTECLTLYNIYPRTGPPSYAKDDEVICTSFYSKIHPLENGEIHISLINGRPSADDPSPELLEFTSARYIRLRFQRIRTLNADLMMFAHKDPREIDPIVTRRYYYSVKDISVGGMCICYGHARACPLDPATNKSRCECEHNTCGDSCDQCCPGFHQKPWRAGTFLTKTECEACNCHGKAEECYYDENVARRNLSLNIRGKYIGGGVCINCTQNTAGINCETCTDGFFRPKGVSPNYPRPCQPCHCDPIGSLNEVCVKDEKHARRGLAPGSCHCKTGFGGVSCDRCARGYTGYPDCKACNCSGLGSKNEDPCFGPCICKENVEGGDCSRCKSGFFNLQEDNWKGCDECFCSGVSNRCQSSYWTYGKIQDMSGWYLTDLPGRIRVAPQQDDLDSPQQISISNAEARQALPHSYYWSAPAPYLGNKLPAVGGQLTFTISYDLEEEEEDTERVLQLMIILEGNDLSISTAQDEVYLHPSEEHTNVLLLKEESFTIHGTHFPVRRKEFMTVLANLKRVLLQITYSFGMDAIFRLSSVNLESAVSYPTDGSIAAAVEVCQCPPGYTGSSCESCWPRHRRVNGTIFGGICEPCQCFGHAESCDDVTGECLNCKDHTGGPYCDKCLPGFYGEPTKGTSEDCQPCACPLNIPSNNFSPTCHLDRSLGLICDGCPVGYTGPRCERCAEGYFGQPSVPGGSCQPCQCNDNLDFSIPGSCDSLSGSCLICKPGTTGRYCELCADGYFGDAVDAKNCQPCRCNAGGSFSEVCHSQTGQCECRANVQGQRCDKCKAGTFGLQSARGCVPCNCNSFGSKSFDCEESGQCWCQPGVTGKKCDRCAHGYFNFQEGGCTACECSHLGNNCDPKTGRCICPPNTIGEKCSKCAPNTWGHSITTGCKACNCSTVGSLDFQCNVNTGQCNCHPKFSGAKCTECSRGHWNYPRCNLCDCFLPGTDATTCDSETKKCSCSDQTGQCTCKVNVEGIHCDRCRPGKFGLDAKNPLGCSSCYCFGTTTQCSEAKGLIRTWVTLKAEQTILPLVDEALQHTTTKGIVFQHPEIVAHMDLMREDLHLEPFYWKLPEQFEGKKLMAYGGKLKYAIYFEAREETGFSTYNPQVIIRGGTPTHARIIVRHMAAPLIGQLTRHEIEMTEKEWKYYGDDPRVHRTVTREDFLDILYDIHYILIKATYGNFMRQSRISEISMEVAEQGRGTTMTPPADLIEKCDCPLGYSGLSCEACLPGFYRLRSQPGGRTPGPTLGTCVPCQCNGHSSLCDPETSICQNCQHHTAGDFCERCALGYYGIVKGLPNDCQQCACPLISSSNNFSPSCVAEGLDDYRCTACPRGYEGQYCERCAPGYTGSPGNPGGSCQECECDPYGSLPVPCDPVTGFCTCRPGATGRKCDGCKHWHAREGWECVFCGDECTGLLLGDLARLEQMVMSINLTGPLPAPYKMLYGLENMTQELKHLLSPQRAPERLIQLAEGNLNTLVTEMNELLTRATKVTADGEQTGQDAERTNTRAKSLGEFIKELARDAEAVNEKAIKLNETLGTRDEAFERNLEGLQKEIDQMIKELRRKNLETQKEIAEDELVAAEALLKKVKKLFGESRGENEEMEKDLREKLADYKNKVDDAWDLLREATDKIREANRLFAVNQKNMTALEKKKEAVESGKRQIENTLKEGNDILDEANRLADEINSIIDYVEDIQTKLPPMSEELNDKIDDLSQEIKDRKLAEKVSQAESHAAQLNDSSAVLDGILDEAKNISFNATAAFKAYSNIKDYIDEAEKVAKEAKDLAHEATKLATGPRGLLKEDAKGCLQKSFRILNEAKKLANDVKENEDHLNGLKTRIENADARNGDLLRTLNDTLGKLSAIPNDTAAKLQAVKDKARQANDTAKDVLAQITELHQNLDGLKKNYNKLADSVAKTNAVVKDPSKNKIIADADATVKNLEQEADRLIDKLKPIKELEDNLKKNISEIKELINQARKQANSIKVSVSSGGDCIRTYKPEIKKGSYNNIVVNVKTAVADNLLFYLGSAKFIDFLAIEMRKGKVSFLWDVGSGVGRVEYPDLTIDDSYWYRIVASRTGRNGTISVRALDGPKASIVPSTHHSTSPPGYTILDVDANAMLFVGGLTGKLKKADAVRVITFTGCMGETYFDNKPIGLWNFREKEGDCKGCTVSPQVEDSEGTIQFDGEGYALVSRPIRWYPNISTVMFKFRTFSSSALLMYLATRDLRDFMSVELTDGHIKVSYDLGSGMASVVSNQNHNDGKWKSFTLSRIQKQATGMDLEVIILSDITQKQKIQYHMFSLTRREAKQWIHEDVKMETIDTGDSKRGEGGEGVKI

SEQ ID NO: 30490 - protein, 397 aa, Artificial Sequence
  Synthetic polypeptide
MSDTKVKVAVRVRPMNRRELELNTKCVVEMEGNQTVLHPPPSNTKQGERKPPKVFAFDYCFWSMDESNTTKYAGQEVVFKCLGEGILEKAFQGYNACIFAYGQTGSGKSFSMMGHAEQLGLIPRLCCALFKRISLEQNESQTFKVEVSYMEIYNEKVRDLLDPKGSRQSLKVREHKVLGPYVDGLSQLAVTSFEDIESLMSEGNKSRTVAATNMNEESSRSHAVFNIIITQTLYDLQSGNSGEKVSKVSLVDLAGSERVSKTGAAGERLKEGSNINKSLTTLGLVISSLADQAAGKGKSKFVPYRDSVLTWLLKDNLGGNSQTSMIATISPAADNYEETLSTLRYADRAKRIVNHAVVNEDPNAKVIRELREEVEKLREQLSQAEAVALKVQDAVFY

SEQ ID NO: 30491 - protein, 397 aa, Artificial Sequence
  Synthetic polypeptide
MSDTKVKVAVRVRPMNRRELELNTKCVVEMEGNQTVLHPPPSNTKQGERRPSQVFAFDYCFWSMDESNTTKYAGQEVVFKCLGEGILEKAFQGYNACIFAYGQTGSGKSFSMMGHAEQLGLIPRLCCALFKRISLEQNESQTFKVEVSYMEIYNEKVRDLLDPKGSRQSLKVREHKVLGPYVDGLSQLAVTSFEDIESLMSEGNKSRTVAATNMNEESSRSHAVFNIIITQTLYDLQSGNSGEKVSKVSLVDLAGSERVSKTGAAGERLKEGSNINKSLTTLGLVISSLADQAAGKGKSKFVPYRDSVLTWLLKDNLGGNSQTSMIATISPAADNYEETLSTLRYADRAKRIVNHAVVNEDPNAKVIRELREEVEKLREQLSQAEAVALKVQDAVFY

SEQ ID NO: 30492 - protein, 182 aa, Artificial Sequence; identical to SEQ ID NO: 3820
  Synthetic polypeptide

SEQ ID NO: 30493 - protein, 212 aa, Artificial Sequence
  Synthetic polypeptide
MAARVLRARGAAWAGGLLQRAAPCSLLPRLRTWTSSSNRSREDSWLKSLFVRKVDPRKDAHSNLLAKKETSNLYKLQFHNVKPECLEAYNKICQEVLPKIHEDKHYPCTLVGTWNTWYGEQDQAVHLWRYEGGYPALTEVMNKLRENKEFLEFRKARSDMLLSRKNQLLLEFSFWNEPVPRSGPNIYELRSYQLRPGTMIEWGNYWRGGSHL

SEQ ID NO: 30494 - protein, 173 aa, Artificial Sequence
  Synthetic polypeptide
MAARVLRARGAAWAGGLLQRAAPCSLLPRLRTWTSSSNRSREDSWLKSLFVRKVDPRKDAHSNLLAKKETSNLYKLQFKRCCQRFTKINTTLVLWWGLGTRGMASRTKLEFLEFRKARSDMLLSRKNQLLLEFSFWNEPVPRSGPNIYELRSYQLRPGTMIEWGNYWRGGSHL

SEQ ID NO: 30495 - protein, 72 aa, Artificial Sequence
  Synthetic polypeptide
MNKLRENKEFLEFRKARSDMLLSRKNQLLLEFSFWNEPVPRSGPNIYELRSYQLRPGTMIEWGNYWRGGSHL

SEQ ID NO: 30496 - protein, 120 aa, Artificial Sequence
  Synthetic polypeptide
  misc_feature (1)..(1): Xaa can be any naturally occurring amino acid
XQEVLPKIHEDKHYPCTLVGTWNTWYGEQDQAVHLWRYEGGYPALTEVMNKLRENKEFLEFRKARSDMLLSRKNQLLLEFSFWNEPVPRSGPNIYELRSYQLRPGTMIEWGNYWRGGSHL

SEQ ID NO: 30497 - protein, 254 aa, Artificial Sequence
  Synthetic polypeptide
MAFSPWQILSPVQWAKWTWSAVRGGAAGEDEAGGPEGDPEEEDSQAETKSLSFRSGCKVKKHETQSLALDACSRDEGAVISQISDISNRDGHATDEEKLASTSCGQKSAGAEVKGEPEEDLEYFECSNVPVSTINHAFSSSEAGIEKETCQKMEEDGSTVLGLLESSAEKAPVSVSCGGESPLDGICLSESDKTAVLTLIREEIITKEIEANEWKKKYEETRQEVLEMRKIVAEYEKTIAQMIDSTVALPLEAT

SEQ ID NO: 30498 - protein, 664 aa, Artificial Sequence
  Synthetic polypeptide
MAFSPWQILSPVQWAKWTWSAVRGGAAGEDEAGGPEGDPEEEDSQAETKSLSFSSDSEGNFETPEAETPIRSPFKESCDPSLGLAGPGAKSQESQEADEQLVAEVVEKCSSKTCSKPSENEVPQQAIDSHSVKNFREEPEHDFSKISIVRPFSIETKDSTDISAVLGTKAAHGCVTAVSGKALPSSPPDALQDEAMTEGSMGVTLEASAEADLKAGNSCPELVPSRRSKLRKPKPVPLRKKAIGGEFSDTNAAVEGTPLPKASYHFSPEELDENTSPLLGDARFQKSPPDLKETPGTLSSDTNDSGVELGEESRSSPLKLEFDFTEDTGNIEARKALPRKLGRKLGSTLTPKIQKDGISKSAGLEQPTDPVARDGPLSQTSSKPDPSQWESPSFNPFGSHSVLQNSPPLSSEGSYHFDPDNFDESMDPFKPTTTLTSSDFCSPTGNHVNEILESPKKAKSRLITSGCKVKKHETQSLALDACSRDEGAVISQISDISNRDGHATDEEKLASTSCGQKSAGAEVKGEPEEDLEYFECSNVPVSTINHAFSSSEAGIEKETCQKMEEDGSTVLGLLESSAEKAPVSVSCGGESPLDGICLSESDKTAVLTLIREEIITKEIEANEWKKKYEETRQEVLEMRKIVAEYEKTIAQMIDSTVALPLEAT

SEQ ID NO: 30499 - protein, 676 aa, Artificial Sequence
  Synthetic polypeptide
MAFSPWQILSPVQWAKWTWSAVRGGAAGEDEAGGPEGDPEEEDSQAETKSLSFSSDSEGNFETPEAETPIRSPFKESCDPSLGLAGPGAKSQESQEADEQLVAEVVEKCSSKTCSKPSENEVPQQAIDSHSVKNFREEPEHDFSKISIVRPFSIETKDSTDISAVLGTKAAHGCVTAVSGKALPSSPPDALQDEAMTEGSMGVTLEASAEADLKAGNSCPELVPSRRSKLRKPKPVPLRKKAIGGEFSDTNAAVEGTPLPKASYHFSPEELDENTSPLLGDARFQKSPPDLKETPGTLSSDTNDSGVELGEESRSSPLKLEFDFTEDTGNIEARKALPRKLGRKLGSTLTPKIQKDGISKSAGLEQPTDPVARDGPLSQTSSKPDPSQWESPSFNPFGSHSVLQNSPPLSSEGSYHFDPDNFDESMDPFKPTTTLTSSDFCSPTGNHVNEILESPKKAKSRLITTTEQVKFLCFLLSGCKVKKHETQSLALDACSRDEGAVISQISDISNRDGHATDEEKLASTSCGQKSAGAEVKGEPEEDLEYFECSNVPVSTINHAFSSSEAGIEKETCQKMEEDGSTVLGLLESSAEKAPVSVSCGGESPLDGICLSESDKTAVLTLIREEIITKEIEANEWKKKYEETRQEVLEMRKIVAEYEKTIAQMIDSTVALPLEAT

SEQ ID NO: 30500 - protein, 102 aa, Artificial Sequence
  Synthetic polypeptide
MEEDGSTVLGLLESSAEKAPVSVSCGGESPLDGICLSESDKTAVLTLIREEIITKEIEANEWKKKYEETRQEVLEMRKIVAEYEKTIAQMIDSTVALPLEAT

SEQ ID NO: 30501 - protein, 226 aa, Artificial Sequence
  Synthetic polypeptide
MGGSHSQTPRGREPAGERHPRPTETASGCKVKKHETQSLALDACSRDEGAVISQISDISNRDGHATDEEKLASTSCGQKSAGAEVKGEPEEDLEYFECSNVPVSTINHAFSSSEAGIEKETCQKMEEDGSTVLGLLESSAEKAPVSVSCGGESPLDGICLSESDKTAVLTLIREEIITKEIEANEWKKKYEETRQEVLEMRKIVAEYEKTIAQMIDSTVALPLEAT

SEQ ID NO: 30502 - protein, 238 aa, Artificial Sequence
  Synthetic polypeptide
MGGSHSQTPRGREPAGERHPRPTETATTEQVKFLCFLLSGCKVKKHETQSLALDACSRDEGAVISQISDISNRDGHATDEEKLASTSCGQKSAGAEVKGEPEEDLEYFECSNVPVSTINHAFSSSEAGIEKETCQKMEEDGSTVLGLLESSAEKAPVSVSCGGESPLDGICLSESDKTAVLTLIREEIITKEIEANEWKKKYEETRQEVLEMRKIVAEYEKTIAQMIDSTVALPLEAT

SEQ ID NO: 30503 - protein, 590 aa, Artificial Sequence
  Synthetic polypeptide
MNNILKLKSSDSEGNFETPEAETPIRSPFKESCDPSLGLAGPGAKSQESQEADEQLVAEVVEKCSSKTCSKPSENEVPQQAIDSHSVKNFREEPEHDFSKISIVRPFSIETKDSTDISAVLGTKAAHGCVTAVSGKALPSSPPDALQDEAMTEGSMGVTLEASAEADLKAGNSCPELVPSRRSKLRKPKPVPLRKKAIGGEFSDTNAAVEGTPLPKASYHFSPEELDENTSPLLGDARFQKSPPDLKETPGTLSSDTNDSGVELGEESRSSPLKLEFDFTEDTGNIEARKALPRKLGRKLGSTLTPKIQKDGISKSAGLEQPTDPVARDGPLSQTSSKPDPSQWESPSFNPFGSHSVLQNSPPLSSEGSYHFDPDNFDESMDPFKPTTTLTSSDFCSPTGNHVNEILESPKKAKSRLITSGCKVKKHETQSLALDACSRDEGAVISQISDISNRDGHATDEEKLASTSCGQKSAGAEVKGIEKETCQKMEEDGSTVLGLLESSAEKAPVSVSCGGESPLDGICLSESDKTAVLTLIREEIITKEIEANEWKKKYEETRQEVLEMRKIVAEYEKTIAQMIDSTVALPLEAT

SEQ ID NO: 30504 - protein, 651 aa, Artificial Sequence
  Synthetic polypeptide
MQRQTIKGAGAGGAALMAFSPWQILSPVQWAKWTWSAVRGGAAGEDEAGGPEGDPEEEDSQAETKSLSFSSDSEGNFETPEAETPIRSPFKESCDPSLGLAGPGAKSQESQEADEQLVAEVVEKCSSKTCSKPSENEVPQQAIDSHSVKNFREEPEHDFSKISIVRPFSIETKDSTDISAVLGTKAAHGCVTAVSGKALPSSPPDALQDEAMTEGSMGVTLEASAEADLKAGNSCPELVPSRRSKLRKPKPVPLRKKAIGGEFSDTNAAVEGTPLPKASYHFSPEELDENTSPLLGDARFQKSPPDLKETPGTLSSDTNDSGVELGEESRSSPLKLEFDFTEDTGNIEARKALPRKLGRKLGSTLTPKIQKDGISKSAGLEQPTDPVARDGPLSQTSSKPDPSQWESPSFNPFGSHSVLQNSPPLSSEGSYHFDPDNFDESMDPFKPTTTLTSSDFCSPTGNHVNEILESPKKAKSRLITSGCKVKKHETQSLALDACSRDEGAVISQISDISNRDGHATDEEKLASTSCGQKSAGAEVKGIEKETCQKMEEDGSTVLGLLESSAEKAPVSVSCGGESPLDGICLSESDKTAVLTLIREEIITKEIEANEWKKKYEETRQEVLEMRKIVAEYEKTIAQMIDSTVALPLEAT

SEQ ID NO: 30505 - protein, 468 aa, Artificial Sequence
  Synthetic polypeptide
MTEGSMGVTLEASAEADLKAGNSCPELVPSRRSKLRKPKPVPLRKKAIGGEFSDTNAAVEGTPLPKASYHFSPEELDENTSPLLGDARFQKSPPDLKETPGTLSSDTNDSGVELGEESRSSPLKLEFDFTEDTGNIEARKALPRKLGRKLGSTLTPKIQKDGISKSAGLEQPTDPVARDGPLSQTSSKPDPSQWESPSFNPFGSHSVLQNSPPLSSEGSYHFDPDNFDESMDPFKPTTTLTSSDFCSPTGNHVNEILESPKKAKSRLITGCKVKKHETQSLALDACSRDEGAVISQISDISNRDGHATDEEKLASTSCGQKSAGAEVKGEPEEDLEYFECSNVPVSTINHAFSSSEAGIEKETCQKMEEDGSTVLGLLESSAEKAPVSVSCGGESPLDGICLSESDKTAVLTLIREEIITKEIEANEWKKKYEETRQEVLEMRKIVAEYEKTIAQMIDSTVALPLEAT

SEQ ID NO: 30506 - protein, 469 aa, Artificial Sequence
  Synthetic polypeptide
MTEGSMGVTLEASAEADLKAGNSCPELVPSRRSKLRKPKPVPLRKKAIGGEFSDTNAAVEGTPLPKASYHFSPEELDENTSPLLGDARFQKSPPDLKETPGTLSSDTNDSGVELGEESRSSPLKLEFDFTEDTGNIEARKALPRKLGRKLGSTLTPKIQKDGISKSAGLEQPTDPVARDGPLSQTSSKPDPSQWESPSFNPFGSHSVLQNSPPLSSEGSYHFDPDNFDESMDPFKPTTTLTSSDFCSPTGNHVNEILESPKKAKSRLITSGCKVKKHETQSLALDACSRDEGAVISQISDISNRDGHATDEEKLASTSCGQKSAGAEVKGEPEEDLEYFECSNVPVSTINHAFSSSEAGIEKETCQKMEEDGSTVLGLLESSAEKAPVSVSCGGESPLDGICLSESDKTAVLTLIREEIITKEIEANEWKKKYEETRQEVLEMRKIVAEYEKTIAQMIDSTVALPLEAT

SEQ ID NO: 30507 - protein, 440 aa, Artificial Sequence
  Synthetic polypeptide
MTEGSMGVTLEASAEADLKAGNSCPELVPSRRSKLRKPKPVPLRKKAIGGEFSDTNAAVEGTPLPKASYHFSPEELDENTSPLLGDARFQKSPPDLKETPGTLSSDTNDSGVELGEESRSSPLKLEFDFTEDTGNIEARKALPRKLGRKLGSTLTPKIQKDGISKSAGLEQPTDPVARDGPLSQTSSKPDPSQWESPSFNPFGSHSVLQNSPPLSSEGSYHFDPDNFDESMDPFKPTTTLTSSDFCSPTGNHVNEILESPKKAKSRLITSGCKVKKHETQSLALDACSRDEGAVISQISDISNRDGHATDEEKLASTSCGQKSAGAEVKGIEKETCQKMEEDGSTVLGLLESSAEKAPVSVSCGGESPLDGICLSESDKTAVLTLIREEIITKEIEANEWKKKYEETRQEVLEMRKIVAEYEKTIAQMIDSTVALPLEAT

SEQ ID NO: 30508 - protein, 314 aa, Artificial Sequence
  Synthetic polypeptide
  misc_feature (1)..(1): Xaa can be any naturally occurring amino acid
XLEQPTDPVARDGPLSQTSSKPDPSQWESPSFNPFGSHSVLQNSPPLSSEGSYHFDPDNFDESMDPFKPTTTLTSSDFCSPTGNHVNEILESPKKAKSRLITTTEQVKFLCFLLSGCKVKKHETQSLALDACSRDEGAVISQISDISNRDGHATDEEKLASTSCGQKSAGAEVKGEPEEDLEYFECSNVPVSTINHAFSSSEAGIEKETCQKMEEDGSTVLGLLESSAEKAPVSVSCGGESPLDGICLSESDKTAVLTLIREEIITKEIEANEWKKKYEETRQEVLEMRKIVAEYEKTIAQMIDSTVALPLEAT

SEQ ID NO: 30509 - protein, 422 aa, Artificial Sequence
  Synthetic polypeptide
  misc_feature (1)..(1): Xaa can be any naturally occurring amino acid
XRSKLRKPKPVPLRKKAIGGEFSDTNAAVEGTPLPKASYHFSPEELDENTSPLLGDARFQKSPPDLKETPGTLSSDTNDSGVELGEESRSSPLKLEFDFTEDTGNIEARKALPRKLGRKLGSTLTPKIQKDGISKSAGLEQPTDPVARDGPLSQTSSKPDPSQWESPSFNPFGSHSVLQNSPPLSSEGSYHFDPDNFDESMDPFKPTTTLTSSDFCSPTGNHVNEILESPKKAKSRLITTTEQVKFLCFLLSGCKVKKHETQSLALDACSRDEGAVISQISDISNRDGHATDEEKLASTSCGQKSAGAEVKGIEKETCQKMEEDGSTVLGLLESSAEKAPVSVSCGGESPLDGICLSESDKTAVLTLIREEIITKEIEANEWKKKYEETRQEVLEMRKIVAEYEKTIAQMIDSTVALPLEAT

SEQ ID NO: 30510 - protein, 11 aa, Artificial Sequence
  Synthetic polypeptide
MGISIVKQCMT

SEQ ID NO: 30511 - protein, 61 aa, Artificial Sequence; identical to SEQ ID NO: 4520
  Synthetic polypeptide

SEQ ID NO: 30512 - protein, 565 aa, Artificial Sequence
  Synthetic polypeptide
LFDTDTWSLQIRKTGAQTATDFPHAIRIWYKTKPEGRSVTWTSDQSGRPCVYTVGSPINNRALFPCQEPPVAMSTWQATVRAAASFVVLMSGENSAKPTQLWEECSSWYYYVTMPMPASTFTIAVGCWTEMKMETWSSNDLATERPFSPSEANFRHVGVCSHMEYPCRFQNASATTQEIIPHRVFAPVCLTGACQETLLRLIPPCLSAAHSVLGAHPFSRLDVLIVPANFPSLGMASPHIMFLSQSILTGGNHLCGTRLCHEIAHAWFGLAIGARDWTEEWLSEGFATHLEDVFWATAQQLAPYEAREQQELRACLRWRRLQDEMQCSPEEMQVLRPSKDKTGHTSDSGASVIKHGLNPEKIFMQVHYLKGYFLLRFLAKRLGDETYFSFLRKFVHTFHGQLILSQDFLQMLLENIPEEKRLELSVENIYQDWLESSGIPKPLQRERRAGAECGLARQVRAEVTKWIGVNRRPRKRKRREKEEVFEKLLPDQLVLLLEHLLEQKTLSPRTLQSLQRTYHLQDQDAEVRHRWCELIVKHKFTKAYKSVERFLQEDQMFHQEKMKLA

SEQ ID NO: 30513 - protein, 684 aa, Artificial Sequence
  Synthetic polypeptide
MDIQLDPARDDLPLMANTSHILVKHYVLDLDVDFESQVIEGTIVLFLEDGNRFKKQNSSIEEACQSESNKACKFGMPEPCHIPVTNARTFSSEMEYNDFAICSKGEKDTSDKDGNHDNQEHASGISSSKYCCDTGNHGSEDFLLVLDCCDLSVLKVEEVDVAAVPGLEKFTRSPELTVVSEEFRNQIVRELVTLPANRWREQLDYYARCSQAPGCGELLFDTDTWSLQIRKTGAQTATDFPHAIRIWYKTKPEGRSVTWTSDQSGRPCVYTVGSPINNRALFPCQEPPVAMSTWQATVRAAASFVVLMSGENSAKPTQLWEECSSWYYYVTMPMPASTFTIAVGCWTEMKMETWSSNDLATERPFSPSEANFRHVGVCSHMEYPCRFQNASATTQEIIPHRVFAPVCLTGACQETLLRLIPPCLSAAHSVLGAHPFSRLDVLIVPANFPSLGMARPSKDKTGHTSDSGASVIKHGLNPEKIFMQVHYLKGYFLLRFLAKRLGDETYFSFLRKFVHTFHGQLILSQDFLQMLLENIPEEKRLELSVENIYQDWLESSGIPKPLQRERRAGAECGLARQVRAEVTKWIGVNRRPRKRKRREKEEVFEKLLPDQLVLLLEHLLEQKTLSPRTLQSLQRTYHLQDQDAEVRHRWCELIVKHKFTKAYKSVERFLQEDQMFHQEKMKLA

SEQ ID NO: 30514 - protein, 783 aa, Artificial Sequence
  Synthetic polypeptide
MDIQLDPARDDLPLMANTSHILVKHYVLDLDVDFESQVIEGTIVLFLEDGNRFKKQNSSIEEACQSESNKACKFGMPEPCHIPVTNARTFSSEMEYNDFAICSKGEKDTSDKDGNHDNQEHASGISSSKYCCDTGNHGSEDFLLVLDCCDLSVLKVEEVDVAAVPGLEKFTRSPELTVVSEEFRNQIVRELVTLPANRWREQLDYYARCSQAPGCGELLFDTDTWSLQIRKTGAQTATDFPHAIRIWYKTKPEGRSVTWTSDQSGRPCVYTVGSPINNRALFPCQEPPVAMSTWQATVRAAASFVVLMSGENSAKPTQLWEECSSWYYYVTMPMPASTFTIAVGCWTEMKMETWSSNDLATERPFSPSEANFRHVGVCSHMEYPCRFQNASATTQEIIPHRVFAPVCLTGACQETLLRLIPPCLSAAHSVLGAHPFSRLDVLIVPANFPSLGMASPHIMFLSQSILTGGNHLCGTRLCHEIAHAWFGLAIGARDWTEEWLSEGFATHLEDVFWATAQQLAPYEAREQQELRACLRWRRLQDEMQCSPEEMQVLRPSKDKTGHTSDSGASVIKHGLNPEKIFMQVHYLKGYFLLRFLAKRLGDETYFSFLRKFVHTFHGQLILSQDFLQMLLENIPEEKRLELSVENIYQDWLESSGIPKPLQRERRAGAECGLARQVRAEVTKWIGVNRRPRKRKRREKEEVFEKLLPDQLVLLLEHLLEQKTLSPRTLQSLQRTYHLQDQDAEVRHRWCELIVKHKFTKAYKSVERFLQEDQMFHQEKMKLA

SEQ ID NO: 30515 - protein, 145 aa, Artificial Sequence
  Synthetic polypeptide
MRMRRPLAGGGKSWGIAHFYKPLQRERRAGAECGLARQVRAEVTKWIGVNRRPRKRKRREKEEVFEKLLPDQLVLLLEHLLEQKTLSPRTLQSLQRTYHLQDQDAEVRHRWCELIVKHKFTKAYKSVERFLQEDQMFHQEKMKLA

SEQ ID NO: 30516 - protein, 124 aa, Artificial Sequence
  Synthetic polypeptide
MRMRRPLAGGGKSWGIAHFYKVTKWIGVNRRPRKRKRREKEEVFEKLLPDQLVLLLEHLLEQKTLSPRTLQSLQRTYHLQDQDAEVRHRWCELIVKHKFTKAYKSVERFLQEDQMFHQEKMKLA

SEQ ID NO: 30517 - protein, 507 aa, Artificial Sequence
  Synthetic polypeptide
VVSEEFRNQIVRELVTLPANRWREQLDYYARCSQAPGCGELLFDTDTWSLQIRKTGAQTATDFPHAIRIWYKTKPEGRSVTWTSDQSGRPCVYTVGSPINNRALFPCQEPPVAMSTWQATVRAAASFVVLMSGENSAKPTQLWEECSSWYYYVTMPMPASTFTIAVGCWTEMKMETWSSNDLATERPFSPSEANFRHVGVCSHMEYPCRFQNASATTQEIIPHRVFAPVCLTGACQETLLRLIPPCLSAAHSVLGAHPFSRLDVLIVPANFPSLGMARPSKDKTGHTSDSGASVIKHGLNPEKIFMQVHYLKGYFLLRFLAKRLGDETYFSFLRKFVHTFHGQLILSQDFLQMLLENIPEEKRLELSVENIYQDWLESSGIPKPLQRERRAGAECGLARQVRAEVTKWIGVNRRPRKRKRREKEEVFEKLLPDQLVLLLEHLLEQKTLSPRTLQSLQRTYHLQDQDAEVRHRWCELIVKHKFTKAYKSVERFLQEDQMFHQEKMKLA

SEQ ID NO: 30518 - protein, 148 aa, Artificial Sequence
  Synthetic polypeptide
  misc_feature (1)..(1): Xaa can be any naturally occurring amino acid
XADPGRAQGAGSGAAAASSPAAGEPLQRERRAGAECGLARQVRAEVTKWIGVNRRPRKRKRREKEEVFEKLLPDQLVLLLEHLLEQKTLSPRTLQSLQRTYHLQDQDAEVRHRWCELIVKHKFTKAYKSVERFLQEDQMFHQEKMKLA

SEQ ID NO: 30519 - protein, 144 aa, Artificial Sequence
  Synthetic polypeptide
  misc_feature (1)..(1): Xaa can be any naturally occurring amino acid
XRAQGAGSGAAAASSPAAGEPLQRERRAGAECGLARQVRAEVTKWIGVNRRPRKRKRREKEEVFEKLLPDQLVLLLEHLLEQKTLSPRTLQSLQRTYHLQDQDAEVRHRWCELIVKHKFTKAYKSVERFLQEDQMFHQEKMKLA

SEQ ID NO: 30520 - protein, 821 aa, Artificial Sequence
  Synthetic polypeptide
MEIPKLLPARGTLQGGGGGGIPAGGGRVHRGPDSPAGQVPTRRLLLLRGPQDGGPGRRREEASTASRGPGPSLLAPRTDQPSGGGGGGGDDFFLVLLDPVGGDVETAGSGQAAGPVLREEAEEGPGLQGGESGANPAGPTALGPRCLSAVPTPAPISAPGPAAAFAGTVTIHNQDLLLRFENGVLTLATPPPHAWEPGAAPAQQPGCLIAPQAGFPHAAHPGDCPELPPDLLLAEPAEPAPAPAPEEEAEGPAAALGPRGPLGSGPGVVLYLCPEAQCGQTFAKKHQLKVHLLTHSSSQGQRPFKCPLGGCGWTFTTSYKLKRHLQSHDKLRPFGCPAEGCGKSFTTVYNLKAHMKGHEQENSFKCEVCEESFPTQAKLSAHQRSHFEPERPYQCAFSGCKKTFITVSALFSHNRAHFREQELFSCSFPGCSKQYDKACRLKIHLRSHTGERPFLCDFDGCGWNFTSMSKLLRHKRKHDDDRRFMCPVEGCGKSFTRAEHLKGHSITHLGTKPFVCPVAGCCARFSARSSLYIHSKKHLQDVDTWKSRCPISSCNKLFTSKHSMKTHMVKRHKVGQDLLAQLEAANSLTPSSELTSQRQNDLSDAEIVSLFSDVPDSTSAALLDTALVNSGILTIDVASVSSTLAGHLPANNNNSVGQAVDPPSLMATSDPPQSLDTSLFFGTAATGFQQSSLNMDEVSSVSVGPLGSLDSLAMKNSSPEPQALTPSSKLTVDTDALTPSSTLCENSVSELLTPTKAEWNVHPDSDFFGQEGETQFGFPNAAGNHGSQKETDLITVTGSSFLTHRWKVLALSQMRLWTVDF

SEQ ID NO: 30521 - protein, 498 aa, Artificial Sequence; identical to SEQ ID NO: 4864
  Synthetic polypeptide

SEQ ID NO: 30522 - protein, 32 aa, Artificial Sequence
  Synthetic polypeptide
GRARWLMPVIPALGRLRRVDHEDWGSDFPQRP

SEQ ID NO: 30523 - protein, 30 aa, Artificial Sequence
  Synthetic polypeptide
GGFQDGRTGTTPVYSSQHEQHRRQVSICQI

SEQ ID NO: 30524 - protein, 121 aa, Artificial Sequence
  Synthetic polypeptide
EAEASQAAQEAEINARKAKNSVTSLLSIINDLLEQLGQLDTVDLNKLNEIEGTLNKAKDEMKVSDLDRKVSDLENEAKKQEAAIMDYNRDIEEIMKDIRNLEDIRKTLPSGCFNTPSIEKP

SEQ ID NO: 30525 - protein, 109 aa, Artificial Sequence; identical to SEQ ID NO: 5815
  Synthetic polypeptide

SEQ ID NO: 30526 - protein, 94 aa, Artificial Sequence; identical to SEQ ID NO: 5976
  Synthetic polypeptide

SEQ ID NO: 30527 - protein, 56 aa, Artificial Sequence
  Synthetic polypeptide
TLWLQLPSLQVTNPEQCFLRIQSFTNISFSMPHRYLTSDCAGACVLGAGVPALSPR

SEQ ID NO: 30528 - protein, 157 aa, Artificial Sequence; identical to SEQ ID NO: 6405
  Synthetic polypeptide

SEQ ID NO: 30529 - protein, 185 aa, Artificial Sequence; identical to SEQ ID NO: 6403
  Synthetic polypeptide

SEQ ID NO: 30530 - protein, 31 aa, Artificial Sequence
  Synthetic polypeptide
CEKQEQKRKHKLFILGMKEAPTYITWTIRRD

SEQ ID NO: 30531 - protein, 54 aa, Artificial Sequence
  Synthetic polypeptide
SQHFGRVRWVDHLRSEVQDQPGQHGETPSLQKYKKLAGRVETLCATLWGFGKAC

SEQ ID NO: 30532 - protein, 53 aa, Artificial Sequence
  Synthetic polypeptide
QAQLFSCVSLYCTSQVSYVSYKVEVCGSPAWSKSVSTIFLTCSRTDQTFCNDA

SEQ ID NO: 30533 - protein, 500 aa, Artificial Sequence; identical to SEQ ID NO: 6977
  Synthetic polypeptide

SEQ ID NO: 30534 - protein, 693 aa, Artificial Sequence; identical to SEQ ID NO: 6973
  Synthetic polypeptide

SEQ ID NO: 30535 - protein, 675 aa, Artificial Sequence; identical to SEQ ID NO: 6978
  Synthetic polypeptide

SEQ ID NO: 30536 - protein, 45 aa, Artificial Sequence
  Synthetic polypeptide
GQARWLTPVISALGRPRRADHLRSGVQDQPGQQGPVTLHKKIHTT

SEQ ID NO: 30537 - protein, 132 aa, Artificial Sequence
  Synthetic polypeptide
GQARWLTPVISALGRPRRADHLRSGVQDQPGQQGPVTLHKKIHTTTVLFIVQIHILLIQAITQAKLQMHLMILQMTGLSILALLGKSTTTIVEQKFHNGKNQKSGLKENRDKKKQTRWQSTASQKIGITEER

SEQ ID NO: 30538 - protein, 657 aa, Artificial Sequence
  Synthetic polypeptide
DLMVLYLFDSCSFTCSHSLCGHHVSRTCPSAMIVSFLKDFPLCHDSLEFNLSANPESSTIFQRNSQTEALEFNPSANPEASTIFQRNSQTDVVEIRRSNCTNHVSAVRFSQQYSLCSTIFLDDSTAIQHYLTMTIISVTLEIPHHITQRDADRTLSIPDEQLHSFAVSTVHIMKKRNGGGSLNNYSSSIPSTPSTSQEDPQFSVPPTANTPTPVCKRSMRWSNLFTSEKGSDPDKERKAPENHADTIGSGRAIPIKQGMLLKRSGKWLKTWKKKYVTLCSNGMLTYYSSLGDYMKNIHKKEIDLQTSTIKVPGKWPSLATSACTPISSSKSNGLSKDMDTGLGDSICFSPSISSTTSPKLNPPPSPHANKKKHLKKKSTNNFMIVSATGQTWHFEATTYEERDAWVQAIQSQILASLQSCESSKSKSQLTSQSEAMALQSIQNMRGNAHCVDCETQNPKWASLNLGVLMCIECSGIHRSLGPHLSRVRSLELDDWPVELRKVMSSIVNDLANSIWEGSSQGQTKPSEKSTREEKERWIRSKYEEKLFLAPLPCTELSLGQQLLRATADEDLQTAILLLAHGSCEEVNETCGEGDGCTALHLACRKGNVVLAQLLIWYGVDVMARDAHGNTALTYARQASSQECINVLLQYGCPDECV

SEQ ID NO: 30539 - protein, 63 aa, Artificial Sequence
  Synthetic polypeptide
DSGQWKTAPSATTIGQAGSKQASRALPPCPWNTQTSGSRATACTPGSGTFVTLVSSVKPARPA

SEQ ID NO: 30540 - protein, 440 aa, Artificial Sequence
  Synthetic polypeptide
SQHFGRRRWADHLTSGVRDQPGQHDEKKKTKKVDNELNPVWNEILEFDLRGIPLDFSSSLGIIVKDFETIGQNKLIGTATVALKDLTGDQSRSLPYKLISLLNEKGQDTGATIDLVIGYDPPSAPHPNDLSGPSVPGMGGDGEEDEGDEDRLDNAVRGPGPKGPVGTVSEAQLARRLTKVKNSRRMLSNKPQDFQIRVRVIEGRQLSGNNIRPVVKVHVCGQTHRTRIKRGNNPFFDELFFYNVNMTPSELMDEIISIRVYNSHSLRADCLMGEFKIDVGFVYDEPGHAVMRKWLLLNDPEDTSSGSKGYMKVSMFVLGTGDEPPPERRDRDNDSDDVESNLLLPAGIALRWVTFLLKIYRAEDIPQMDDAFSQTVKEIFGGNADKKNLVDPFVEVSFAGKKVCTNIIEKNANPEWNQVVNLQIKFPSVCEKIKLTIYDW

SEQ ID NO: 30541 - protein, 2046 aa, Artificial Sequence
  Synthetic polypeptide
SQHFGRRRWADHLTSGVRDQPGQHDEKKKTKKVDNELNPVWNEILEFDLRGIPLDFSSSLGIIVKDFETIGQNKLIGTATVALKDLTGDQSRSLPYKLISLLNEKGQDTGATIDLVIGYDPPSAPHPNDLSGPSVPGMGGDGEEDEGDEDRLDNAVRGPGPKGPVGTVSEAQLARRLTKVKNSRRMLSNKPQDFQIRVRVIEGRQLSGNNIRPVVKVHVCGQTHRTRIKRGNNPFFDELFFYNVNMTPSELMDEIISIRVYNSHSLRADCLMGEFKIDVGFVYDEPGHAVMRKWLLLNDPEDTSSGSKGYMKVSMFVLGTGDEPPPERRDRDNDSDDVESNLLLPAGIALRWVTFLLKIYRAEDIPQMDDAFSQTVKEIFGGNADKKNLVDPFVEVSFAGKKVCTNIIEKNANPEWNQVVNLQIKFPSVCEKIKLTIYDWDRLTKNDVVGTTYLHLSKIAASGGEVEDFSSSGTGAASYTVNTGETEVGFVPTFGPCYLNLYGSPREYTGFPDPYDELNTGKGEGVAYRGRILVELATFLEKTPPDKKLEPISNDDLLVVEKYQRRRKYSLSAVFHSATMLQDVGEAIQFEVSIGNYGNKFDTTCKPLASTTQYSRAVFDGNYYYYLPWAHTKPVVTLTSYWEDISHRLDAVNTLLAMAERLQTNIEALKSGIQGKIPANQLAELWLKLIDEVIEDTRYTLPLTEGKANVTVLDTQIRKLRSRSLSQIHEAAVRMRSEATDVKSTLAEIEDWLDKLMQLTEEPQNSMPDIIIWMIRGEKRLAYARIPAHQVLYSTSGENASGKYCGKTQTIFLKYPQEKNNGPKVPVELRVNIWLGLSAVEKKFNSFAEGTFTVFAEMYENQALMFGKWGTSGLVGRHKFSDVTGKIKLKREFFLPPKGWEWEGEWIVDPERSLLTEADAGHTEFTDEVYQNESRYPGGDWKPAEDTYTDANGDKAASPSELTCPPGWEWEDDAWSYDINRAVDEKGWEYGITIPPDHKPKSWVAAEKMYHTHRRRRLVRKRKKDLTQTASSTARAMEELQDQEGWEYASLIGWKFHWKQRSSDTFRRRRWRRKMAPSETHGAAAIFKLEGALGADTTEDGDEKSLEKQKHSATTVFGANTPIVSCNFDRVYIYHLRCYVYQARNLLALDKDSFSDPYAHICFLHRSKTTEIIHSTLNPTWDQTIIFDEVEIYGEPQTVLQNPPKVIMELFDNDQVGKDEFLGRSIFSPVVKLNSEMDITPKLLWHPVMNGDKACGDVLVTAELILRGKDGSNLPILPPQRAPNLYMVPQGIRPVVQLTAIEILAWGLRNMKNFQMASITSPSLVVECGGERVESVVIKNLKKTPNFPSSVLFMKVFLPKEELYMPPLVIKVIDHRQFGRKPVVGQCTIERLDRFRCDPYAGKEDIVPQLKASLLSAPPCRDIVIEMEDTKPLLASKCLSSMSTALSKMASPATVHVLDEEEEIVDWWSKFYASSGEHEKCGQYIQKGYSKLKIYNCELENVAEFEGLTDFSDTFKLYRGKSDENEDPSVVGEFKGSFRIYPLPDDPSVPAPPRQFRELPDSVPQECTVRIYIVRGLELQPQDNNGLCDPYIKITLGKKVIEDRDHYIPNTLNPVFGRMYELSCYLPQEKDLKISVYDYDTFTRDEKVGETIIDLENRFLSRFGSHCGIPEEYCVSGVNTWRDQLRPTQLLQNVARFKGFPQPILSEDGSRIRYGGRDYSLDEFEANKILHQHLGAPEERLALHILRTQGLVPEHVETRTLHSTFQPNISQRYYLRVIIWNTKDVILDEKSITGEEMSDIYVKGWIPGNEENKQKTDVHYRSLDGEGNFNWRFVFPFDYLPAEQLCIVAKKEHFWSIDQTEFRIPPRLIIQIWDNDKFSLDDYLGFLELDLRHTIIPAKSPEKCRLDMIPDLKAMNPLKAKTASLFEQKSMKGWWPCYAEKDGARVMAGKVEMTLEILNEKEADERPAGKGRDEPNMNPKLDLPNRPETSFLWFTNPCKTMKFIVWRRFKWVIIGLLFLLILLLFVAVLLYSLPNYLSMKIVKPNV

SEQ ID NO: 30542 - protein, 2056 aa, Artificial Sequence
  Synthetic polypeptide
SQHFGRRRWADHLTSGVRDQPGQHDEKKKTKKVDNELNPVWNEILEFDLRGIPLDFSSSLGIIVKDFETIGQNKLIGTATVALKDLTGDQSRSLPYKLISLLNEKGQDTGATIDLVIGYDPPSAPHPNDLSGPSVPGMGGDGEEDEGDEDRLDNAVRGPGPKGPVGTVSEAQLARRLTKVKNSRRMLSNKPQDFQIRVRVIEGRQLSGNNIRPVVKVHVCGQTHRTRIKRGNNPFFDELFFYNVNMTPSELMDEIISIRVYNSHSLRADCLMGEFKIDVGFVYDEPGHAVMRKWLLLNDPEDTSSGSKGYMKVSMFVLGTGDEPPPERRDRDNDSDDVESNLLLPAGIALRWVTFLLKIYRAEDIPQMDDAFSQTVKEIFGGNADKKNLVDPFVEVSFAGKKVCTNIIEKNANPEWNQVVNLQIKFPSVCEKIKLTIYDWDRLTKNDVVGTTYLHLSKIAASGGEVEDFSSSGTGAASYTVNTGETEVGFVPTFGPCYLNLYGSPREYTGFPDPYDELNTGKGEGVAYRGRILVELATFLEKTPPDKKLEPISNDDLLVVEKYQRRRKYSLSAVFHSATMLQDVGEAIQFEVSIGNYGNKFDTTCKPLASTTQYSRAVFDGNYYYYLPWAHTKPVVTLTSYWEDISHRLDAVNTLLAMAERLQTNIEALKSGIQGKIPANQLAELWLKLIDEVIEDTRYTLPLTEGKANVTVLDTQIRKLRSRSLSQIHEAAVRMRSEATDVKSTLAEIEDWLDKLMQLTEEPQNSMPDIIIWMIRGEKRLAYARIPAHQVLYSTSGENASGKYCGKTQTIFLKYPQEKNNGPKVPVELRVNIWLGLSAVEKKFNSFAEGTFTVFAEMYENQALMFGKWGTSGLVGRHKFSDVTGKIKLKREFFLPPKGWEWEGEWIVDPERSLLTEADAGHTEFTDEVYQNESRYPGGDWKPAEDTYTDANGDKAASPSELTCPPGWEWEDDAWSYDINRAVDEKGWEYGITIPPDHKPKSWVAAEKMYHTHRRRRLVRKRKKDLTQTASSTARAMEELQDQEGWEYASLIGWKFHWKQRSSDTFRRRRWRRKMAPSETHGAAAIFKLEGALGADTTEDGDEKSLEKQKHSATTVFGANTPIVSCNFDRVYIYHLRCYVYQARNLLALDKDSFSDPYAHICFLHRSKTTEIIHSTLNPTWDQTIIFDEVEIYGEPQTVLQNPPKVIMELFDNDQVGKDEFLGRSIFSPVVKLNSEMDITPKLLWHPVMNGDKACGDVLVTAELILRGKDGSNLPILPPQRAPNLYMVPQGIRPVVQLTAIEILAWGLRNMKNFQMASITSPSLVVECGGERVESVVIKNLKKTPNFPSSVLFMKVFLPKEELYMPPLVIKVIDHRQFGRKPVVGQCTIERLDRFRCDPYAGKEDIVPQLKASLLSAPPCRDIVIEMEDTKPLLASKLTEKEEEIVDWWSKFYASSGEHEKCGQYIQKGYSKLKIYNCELENVAEFEGLTDFSDTFKLYRGKSDENEDPSVVGEFKGSFRIYPLPDDPSVPAPPRQFRELPDSVPQECTVRIYIVRGLELQPQDNNGLCDPYIKITLGKKVIEDRDHYIPNTLNPVFGRMYELSCYLPQEKDLKISVYDYDTFTRDEKVGETIIDLENRFLSRFGSHCGIPEEYCVSGVNTWRDQLRPTQLLQNVARFKGFPQPILSEDGSRIRYGGRDYSLDEFEANKILHQHLGAPEERLALHILRTQGLVPEHVETRTLHSTFQPNISQGKLQMWVDVFPKSLGPPGPPFNITPRKAKKYYLRVIIWNTKDVILDEKSITGEEMSDIYVKGWIPGNEENKQKTDVHYRSLDGEGNFNWRFVFPFDYLPAEQLCIVAKKEHFWSIDQTEFRIPPRLIIQIWDNDKFSLDDYLGFLELDLRHTIIPAKSPEKCRLDMIPDLKAMNPLKAKTASLFEQKSMKGWWPCYAEKDGARVMAGKVEMTLEILNEKEADERPAGKGRDEPNMNPKLDLPNRPETSFLWFTNPCKTMKFIVWRRFKWVIIGLLFLLILLLFVAVLLYSLPNYLSMKIVKPNV

SEQ ID NO: 30543 - protein, 2056 aa, Artificial Sequence
  Synthetic polypeptide
SQHFGRRRWADHLTSGVRDQPGQHDEKKKTKKVDNELNPVWNEILEFDLRGIPLDFSSSLGIIVKDFETIGQNKLIGTATVALKDLTGDQSRSLPYKLISLLNEKGQDTGATIDLVIGYDPPSAPHPNDLSGPSVPGMGGDGEEDEGDEDRLDNAVRGPGPKGPVGTVSEAQLARRLTKVKNSRRMLSNKPQDFQIRVRVIEGRQLSGNNIRPVVKVHVCGQTHRTRIKRGNNPFFDELFFYNVNMTPSELMDEIISIRVYNSHSLRADCLMGEFKIDVGFVYDEPGHAVMRKWLLLNDPEDTSSGSKGYMKVSMFVLGTGDEPPPERRDRDNDSDDVESNLLLPAGIALRWVTFLLKIYRAEDIPQMDDAFSQTVKEIFGGNADKKNLVDPFVEVSFAGKKVCTNIIEKNANPEWNQVVNLQIKFPSVCEKIKLTIYDWDRLTKNDVVGTTYLHLSKIAASGGEVEDFSSSGTGAASYTVNTGETEVGFVPTFGPCYLNLYGSPREYTGFPDPYDELNTGKGEGVAYRGRILVELATFLEKTPPDKKLEPISNDDLLVVEKYQRRRKYSLSAVFHSATMLQDVGEAIQFEVSIGNYGNKFDTTCKPLASTTQYSRAVFDGNYYYYLPWAHTKPVVTLTSYWEDISHRLDAVNTLLAMAERLQTNIEALKSGIQGKIPANQLAELWLKLIDEVIEDTRYTLPLTEGKANVTVLDTQIRKLRSRSLSQIHEAAVRMRSEATDVKSTLAEIEDWLDKLMQLTEEPQNSMPDIIIWMIRGEKRLAYARIPAHQVLYSTSGENASGKYCGKTQTIFLKYPQEKNNGPKVPVELRVNIWLGLSAVEKKFNSFAEGTFTVFAEMYENQALMFGKWGTSGLVGRHKFSDVTGKIKLKREFFLPPKGWEWEGEWIVDPERSLLTEADAGHTEFTDEVYQNESRYPGGDWKPAEDTYTDANGDKAASPSELTCPPGWEWEDDAWSYDINRAVDEKGWEYGITIPPDHKPKSWVAAEKMYHTHRRRRLVRKRKKDLTQTASSTARAMEELQDQEGWEYASLIGWKFHWKQRSSDTFRRRRWRRKMAPSETHGAAAIFKLEGALGADTTEDGDEKSLEKQKHSATTVFGANTPIVSCNFDRVYIYHLRCYVYQARNLLALDKDSFSDPYAHICFLHRSKTTEIIHSTLNPTWDQTIIFDEVEIYGEPQTVLQNPPKVIMELFDNDQVGKDEFLGRSIFSPVVKLNSEMDITPKLLWHPVMNGDKACGDVLVTAELILRGKDGSNLPILPPQRAPNLYMVPQGIRPVVQLTAIEILAWGLRNMKNFQMASITSPSLVVECGGERVESVVIKNLKKTPNFPSSVLFMKVFLPKEELYMPPLVIKVIDHRQFGRKPVVGQCTIERLDRFRCDPYAGKEDIVPQLKASLLSAPPCRDIVIEMEDTKPLLASKLVSIEEEIVDWWSKFYASSGEHEKCGQYIQKGYSKLKIYNCELENVAEFEGLTDFSDTFKLYRGKSDENEDPSVVGEFKGSFRIYPLPDDPSVPAPPRQFRELPDSVPQECTVRIYIVRGLELQPQDNNGLCDPYIKITLGKKVIEDRDHYIPNTLNPVFGRMYELSCYLPQEKDLKISVYDYDTFTRDEKVGETIIDLENRFLSRFGSHCGIPEEYCVSGVNTWRDQLRPTQLLQNVARFKGFPQPILSEDGSRIRYGGRDYSLDEFEANKILHQHLGAPEERLALHILRTQGLVPEHVETRTLHSTFQPNISQGKLQMWVDVFPKSLGPPGPPFNITPRKAKKYYLRVIIWNTKDVILDEKSITGEEMSDIYVKGWIPGNEENKQKTDVHYRSLDGEGNFNWRFVFPFDYLPAEQLCIVAKKEHFWSIDQTEFRIPPRLIIQIWDNDKFSLDDYLGFLELDLRHTIIPAKSPEKCRLDMIPDLKAMNPLKAKTASLFEQKSMKGWWPCYAEKDGARVMAGKVEMTLEILNEKEADERPAGKGRDEPNMNPKLDLPNRPETSFLWFTNPCKTMKFIVWRRFKWVIIGLLFLLILLLFVAVLLYSLPNYLSMKIVKPNV

SEQ ID NO: 30544 - protein, 2043 aa, Artificial Sequence
  Synthetic polypeptide
SQHFGRRRWADHLTSGVRDQPGQHDEKKKTKKVDNELNPVWNEILEFDLRGIPLDFSSSLGIIVKDFETIGQNKLIGTATVALKDLTGDQSRSLPYKLISLLNEKGQDTGATIDLVIGYDPPSAPHPNDLSGPSVPGMGGDGEEDEGDEDRLDNAVRGPGPKGPVGTVSEAQLARRLTKVKNSRRMLSNKPQDFQIRVRVIEGRQLSGNNIRPVVKVHVCGQTHRTRIKRGNNPFFDELFFYNVNMTPSELMDEIISIRVYNSHSLRADCLMGEFKIDVGFVYDEPGHAVMRKWLLLNDPEDTSSGSKGYMKVSMFVLGTGDEPPPERRDRDNDSDDVESNLLLPAGIALRWVTFLLKIYRAEDIPQMDDAFSQTVKEIFGGNADKKNLVDPFVEVSFAGKKVCTNIIEKNANPEWNQVVNLQIKFPSVCEKIKLTIYDWDRLTKNDVVGTTYLHLSKIAASGGEVEVNTGETEVGFVPTFGPCYLNLYGSPREYTGFPDPYDELNTGKGEGVAYRGRILVELATFLEKTPPDKKLEPISNDDLLVVEKYQRRRKYSLSAVFHSATMLQDVGEAIQFEVSIGNYGNKFDTTCKPLASTTQYSRAVFDGNYYYYLPWAHTKPVVTLTSYWEDISHRLDAVNTLLAMAERLQTNIEALKSGIQGKIPANQLAELWLKLIDEVIEDTRYTLPLTEGKANVTVLDTQIRKLRSRSLSQIHEAAVRMRSEATDVKSTLAEIEDWLDKLMQLTEEPQNSMPDIIIWMIRGEKRLAYARIPAHQVLYSTSGENASGKYCGKTQTIFLKYPQEKNNGPKVPVELRVNIWLGLSAVEKKFNSFAEGTFTVFAEMYENQALMFGKWGTSGLVGRHKFSDVTGKIKLKREFFLPPKGWEWEGEWIVDPERSLLTEADAGHTEFTDEVYQNESRYPGGDWKPAEDTYTDANGDKAASPSELTCPPGWEWEDDAWSYDINRAVDEKGWEYGITIPPDHKPKSWVAAEKMYHTHRRRRLVRKRKKDLTQTASSTARAMEELQDQEGWEYASLIGWKFHWKQRSSDTFRRRRWRRKMAPSETHGAAAIFKLEGALGADTTEDGDEKSLEKQKHSATTVFGANTPIVSCNFDRVYIYHLRCYVYQARNLLALDKDSFSDPYAHICFLHRSKTTEIIHSTLNPTWDQTIIFDEVEIYGEPQTVLQNPPKVIMELFDNDQVGKDEFLGRSIFSPVVKLNSEMDITPKLLWHPVMNGDKACGDVLVTAELILRGKDGSNLPILPPQRAPNLYMVPQGIRPVVQLTAIEILAWGLRNMKNFQMASITSPSLVVECGGERVESVVIKNLKKTPNFPSSVLFMKVFLPKEELYMPPLVIKVIDHRQFGRKPVVGQCTIERLDRFRCDPYAGKEDIVPQLKASLLSAPPCRDIVIEMEDTKPLLASKLTEKEEEIVDWWSKFYASSGEHEKCGQYIQKGYSKLKIYNCELENVAEFEGLTDFSDTFKLYRGKSDENEDPSVVGEFKGSFRIYPLPDDPSVPAPPRQFRELPDSVPQECTVRIYIVRGLELQPQDNNGLCDPYIKITLGKKVIEDRDHYIPNTLNPVFGRMYELSCYLPQEKDLKISVYDYDTFTRDEKVGETIIDLENRFLSRFGSHCGIPEEYCVSGVNTWRDQLRPTQLLQNVARFKGFPQPILSEDGSRIRYGGRDYSLDEFEANKILHQHLGAPEERLALHILRTQGLVPEHVETRTLHSTFQPNISQGKLQMWVDVFPKSLGPPGPPFNITPRKAKKYYLRVIIWNTKDVILDEKSITGEEMSDIYVKGWIPGNEENKQKTDVHYRSLDGEGNFNWRFVFPFDYLPAEQLCIVAKKEHFWSIDQTEFRIPPRLIIQIWDNDKFSLDDYLGFLELDLRHTIIPAKSPEKCRLDMIPDLKAMNPLKAKTASLFEQKSMKGWWPCYAEKDGARVMAGKVEMTLEILNEKEADERPAGKGRDEPNMNPKLDLPNRPETSFLWFTNPCKTMKFIVWRRFKWVIIGLLFLLILLLFVAVLLYSLPNYLSMKIVKPNV

SEQ ID NO: 30545 - protein, 155 aa, Artificial Sequence
  Synthetic polypeptide
SQHFGRRRWADHLTSGVRDQPGQHDEKKKTKKVDNELNPVWNEILEFDLRGIPLDFSSSLGIIVKDFETIGQNKLIGTATVALKDLTGDQSRSLPYKLISLLNEKGQDTGATIDLVIGYDPPSAPHPNDLSGPSVPGMGGKLTLLKAQPPPGGGC

SEQ ID NO: 30546 - protein, 31 aa, Artificial Sequence
  Synthetic polypeptide
FLKDLELEIPFGPAIPLLGSCSQCRNRICCC

SEQ ID NO: 30547 - protein, 27 aa, Artificial Sequence
  Synthetic polypeptide
SQHLGRPRQADHLMPGVQDQPNMTSVP

SEQ ID NO: 30548 - protein, 27 aa, Artificial Sequence
  Synthetic polypeptide
IWLTEDATALLQRPGWRRRWRPSSPRL

SEQ ID NO: 30549 - protein, 77 aa, Artificial Sequence
  Synthetic polypeptide
SEAHVLLALQVSWSCSTALQSTPCPGQLPSARGPLVTGGWGQREKLIGSESSRLLERQLQVCVLQIMGSCVPSCPTP

SEQ ID NO: 30550 - protein, 81 aa, Artificial Sequence
  Synthetic polypeptide
SEAHVLLALQVSWSCSTALQSTPCPGQLPSARGPLVTGGWGQREKLIGSESSRLLERQLQVCVLQIMGSCVPSCPTPSWTA

SEQ ID NO: 30551 - protein, 135 aa, Artificial Sequence
  Synthetic polypeptide
SEAHVLLALQVSWSCSTALQSTPCPGQLPSARGPLVTGGWGQREKLIGSESSRLLERQLQVCVLQIMGSCVPSCPTPSWTASASSTPPGSCLERSSGSAEAMTLQPSWSGSRSVWTASSCSSTPTSWTSPMSSRK

SEQ ID NO: 30552 - protein, 66 aa, Artificial Sequence
  Synthetic polypeptide
MISAFPTEGQRVRYPRYQTRKPKPQWAQKTHLEAKPAQTLRTCGQVCSITSSCSFCATACCSWRSS

SEQ ID NO: 30553 - protein, 64 aa, Artificial Sequence
  Synthetic polypeptide
ASGDPSTGQQHPFITAETWKRPKCPEMLPTSQTLRLINLCLKFPNLTMFKTMAEMCICKMKITR

SEQ ID NO: 30554 - protein, 876 aa, Artificial Sequence
  Synthetic polypeptide
VASQLGQIQNVKSRSSQWKLDTAVGWMRQLINDPVSFVWCTVVAKLLVNDPETAVKELEALLGFTLRVGVPNTRPVKKTMEIPKDSLQKYLKDLLGIQTTGPLELLQFDHGQSNPTYYIRLANRDLVLRKKPPGTLLPSAHAIEREFRIMKALANAGVPVPNVLDLCEDSSVIGTPFYVMEYCPGLIYKDPSLPGLEPSHRRAIYTAMNTVLCKIHSVDLQAVGLEDYGKQGDYIPRQVRTWVKQYRASETSTIPAMERLIEWLPLHLPRQQRTTVVHGDFRLDNLVFHPEEPEVLAVLDWELSTLGDPLADVAYSCLAHYLPSSFPVLRGINDCDLTQLGIPAAEEYFRMYCLQMGLPPTENWNFYMAFSFFRVAAILQGVYKRSLTGQASSTYAEQTGKLTEFVSNLAWDFAVKEGFRVFKEMPFTNPLTRSYHTWARPQSQWCPTGSRSYSSVPEASPAHTSRGGLVISPESLSPPVRELYHRLKHFMEQRVYPAEPELQSHQASAARWSPSPLIEDLKEKAKAEGLWNLFLPLEADPEKKYGAGLTNVEYAHLCELMGTSLYAPEVCNCSAPDTGNMELLVRYGTEAQKARWLIPLLEGKARSCFAMTEPQVASSDATNIEASIREEDSFYVINGHKWWITGILDPRCQLCVFMGKTDPHAPRHRQQSVLLVPMDTPGIKIIRPLTVYGLEDAPGGHGEVRFEHVRVPKENMVLGPGRGFEIAQGRLGPGRIHHCMRLIGFSERALALMKARVKSRLAFGKPLVEQGTVLADIAQSRVEIEQARLLVLRAAHLMDLAGNKAAALDIAMIKMVAPSMASRVIDRAIQAFGAAGLSSDYPLAQFFTWARALRFADGPDEVHRATVAKLELKHRI

SEQ ID NO: 30555 - protein, 527 aa, Artificial Sequence
  Synthetic polypeptide
VASQLGQIQNVKSRSSQWKLDTAVGWMRQLINDPVSFVWCTVVAKLLVNDPETAVKELEALLGFTLRVGVPNTRPVKKTMEIPKDSLQKYLKDLLGIQTTGPLELLQFDHGQSNPTYYIRLANRDLVLRKKPPGTLLPSAHAIEREFRIMKALANAGVPVPNVLDLCEDSSVIGTPFYVMEYCPGLIYKDPSLPGLEPSHRRAIYTAMNTVLCKIHSVDLQAVGLEDYGKQGDYIPRQVRTWVKQYRASETSTIPAMERLIEWLPLHLPRQQRTTVVHGDFRLDNLVFHPEEPEVLAVLDWELSTLGDPLADVAYSCLAHYLPSSFPVLRGINDCDLTQLGIPAAEEYFRMYCLQMGLPPTENWNFYMAFSFFRVAAILQGVYKRSLTGQASSTYAEQTGKLTEFVSNLAWDFAVKEGFRVFKEMPFTNPLTRSYHTWARPQSQWCPTGSRSYSSVPEASPAHTSRGGLVISPESLSPPVRELYHRLKHFMEQRVYPAEPELQSHQASAARWSPSPLIEDLKVKQPW

SEQ ID NO: 30556 - protein, 273 aa, Artificial Sequence
  Synthetic polypeptide
VASQLGQIQNVKSRSSQWKLDTAVGWMRQLINDPVSFVWCTVVAKLLVNDPETAVKELEALLGFTLRVGVPNTRPVKKTMEIPKDSLQKYLKDLLGIQTTGPLELLQFDHGQSNPTYYIRLANRDLVLRKKPPGTLLPSAHAIEREFRIMKALANAGVPVPNVLDLCEDSSVIGTPFYVMEYCPGLIYKDPSLPGLEPSHRRAIYTAMNTVLCKIHSVDLQAVGLEDYGKQGSTTWCFIQKSQRCLLSLTGNFLPWATPLLMWPTAAWLITCH

SEQ ID NO: 30557 - protein, 54 aa, Artificial Sequence; identical to SEQ ID NO: 9113
  Synthetic polypeptide

SEQ ID NO: 30558 - protein, 59 aa, Artificial Sequence; identical to SEQ ID NO: 9105
  Synthetic polypeptide

SEQ ID NO: 30559 - protein, 37 aa, Artificial Sequence
  Synthetic polypeptide
ILLLYPSCVSQTLQSAFSLTAVKRKSGFSFLLGIVGF

SEQ ID NO: 30560 - protein, 45 aa, Artificial Sequence
  Synthetic polypeptide
ILLLYPSCVSQTLQSAFSLTAVKRKSGFSFLLGIVGFDSSQILHY

SEQ ID NO: 30561 - protein, 13 aa, Artificial Sequence
  Synthetic polypeptide
ELGVTAGGLPTRL

SEQ ID NO: 30562 - protein, 23 aa, Artificial Sequence
  Synthetic polypeptide
CQMVTQIYKKYSNVLEMAWLQYA

SEQ ID NO: 30563 - protein, 22 aa, Artificial Sequence
  Synthetic polypeptide
SQHFGRPSCVPLPATGVKMSFA

SEQ ID NO: 30564 - protein, 16 aa, Artificial Sequence
  Synthetic polypeptide
GQEFKTSLANMDMFKE

SEQ ID NO: 30565 - protein, 125 aa, Artificial Sequence
  Synthetic polypeptide
HVSTKKKKKKLASTTSVSEEDVSSRYSRTDRSGFPRYNRDANVSGTLVSSSTLEKKIEDLEKEVVRERQENLRLVRLMQDKEEMIGKLKEEIDLLNRDLDDIEDENEQLKQENKTLLKVVGQLTR

SEQ ID NO: 30566 - protein, 83 aa, Artificial Sequence; identical to SEQ ID NO: 10278
  Synthetic polypeptide

SEQ ID NO: 30567 - protein, 14 aa, Artificial Sequence
  Synthetic polypeptide
LLITAEDQSMWIQS

SEQ ID NO: 30568 - protein, 9 aa, Artificial Sequence
  Synthetic polypeptide
IVEQTLKTN

SEQ ID NO: 30569 - protein, 338 aa, Artificial Sequence
  Synthetic polypeptide
CMCLEYPAVVEFAPFQKIAKKKLRKKDAKTGSIEDDPEYKKFLETYCVEEEKTSANPETLLGEMEAKTRELIARRTTPLLEYIKNRKLEKQRIREEKREERRRRELEKKRLREEEKRRRREEERCKKKETDKQKKIAEKEVRIKLLKKPEKGEEPTTEKPKERGEEIDTGGGKQESCAPGAVVKARPMEGSLEEPQETSHSGSDKEHRDVERSQEQESEAQRYHVDDGRRHRAHHEPERLSRRSEDEQRWGKGPGQDRGKKGSQDSGAPGEAMERLGRAQRCDDSPAPRKERLANKDRPALQLYDPGARFRARECGGNRRICKAEGSGTGPEKREEAE

SEQ ID NO: 30570 - protein, 43 aa, Artificial Sequence
  Synthetic polypeptide
LNIHLLMVTSSVTSSSILINLDRYILIQGCKFLDKTGIAFFIC

SEQ ID NO: 30571 - protein, 314 aa, Artificial Sequence
  Synthetic polypeptide
TSPVAGPALPPNYKSSSSDSSDSDEDSSSLYEEGNQESEEDDSGPTARKQRKNQDDDDDDDDGFFGPALPPGFKKQDDSPPRPIIGPALPPGFIKSTQKSDKGRDDPGQQETDSSEDEDIIGPMPAKGPVNYNVTTEFEKRAQRMKEKLTKGDDDSSKPIVRESWMTELPPEMKDFGLGPRTFKRRADDTSGDRSIWTDTPADRERKAKETQEARKSSSKKDEEHILSGRDKRLAEQVSSYNESKRSESLMDIHHKKLKSKAAEDKNKPQERIPFDRDKDLKVNRFDEAQKKALIKKSRELNTRFSHGKGNMFL

SEQ ID NO: 30572 - protein, 42 aa, Artificial Sequence
  Synthetic polypeptide
LQEMGPLGVPQRGQAACRHQLRPGQGRALGEGPGQPQWDVCE

SEQ ID NO: 30573 - protein, 31 aa, Artificial Sequence
  Synthetic polypeptide
MQENTLRAPTDSTLWHPPHYKSFPWPECSGP

SEQ ID NO: 30574 - protein, 341 aa, Artificial Sequence
  Synthetic polypeptide
DQARWLTIIIPTLREAEEPSDNGPLFTELKFYQRAAKPEQIQKWIRTRKLKYLGVPKYWGSGLHDKNGKSYRFMIMDRFGSDLQKIYEANAKRFSRKTVLQLSLRILDILEYIHEHEYVHGDIKASNLLLNYKNPDQVYLVDYGLAYRYCPEGVHKEYKEDPKRCHDGTIEFTSIDAHNGVAPSRRGDLEILGYCMIQWLTGHLPWEDNLKDPKYVRDSKIRYRENIASLMDKCFPEKNKPGEIAKYMETVKLLDYTEKPLYENLRDILLQGLKAIGSKDDGKLDLSVVENGGLKAKTITKKRKKEIEESKEPGVEDTEWSNTQTEEAIQTRSRTRKRVQK

SEQ ID NO: 30575 - protein, 51 aa, Artificial Sequence
  Synthetic polypeptide
MGAVVHACKPSTLGGRGRRRSSGKPGPAAIAWRSSGSCRPSCRTPRRWLRG

SEQ ID NO: 30576 - protein, 30 aa, Artificial Sequence
  Synthetic polypeptide
SVFGRINSAHLQTLSAGKACVQRGCASAPV

SEQ ID NO: 30577 - protein, 370 aa, Artificial Sequence
  Synthetic polypeptide
TRESEVAVGRDPAIALQPGPQSERVLCFHGPLLYEAKCVKVAIKDKQVKYFIHYSGWNKKSAVRPRRSEKSLKTHEDIVALFPVPEGAPSVHHPLLTSSWDEWVPESRVLKYVDTNLQKQRELQKANQEQYAEGKMRGAAPGKKTSGLQQKNVEVKTKKNKQKTPGNGDGGSTSETPQPPRKKRARVDPTVENEETFMNRVEVKVKIPEELKPWLVDDWDLITRQKQLFYLPAKKNVDSILEDYANYKKSRGNTDNKEYAVNEVVAGIKEYFNVMLGTQLLYKFERPQYAEILADHPDAPMSQVYGAPHLLRLFVRIGAMLAYTPLDEKSLALLLNYLHDFLKYLAKNSATLFSASDYEVAPPEYHRKAV

SEQ ID NO: 30578 - protein, 243 aa, Artificial Sequence
  Synthetic polypeptide
TRESEVAVGRDPAIALQPGPQSERVLCFHGPLLYEAKCVKVAIKDKQVKYFIHYSGWNKNWDEWVPESRVLKYVDTNLQKQRELQKANQEQYAEGKMRGAAPGKKTSGLQQKNVEVKTKKNKQKTPGNGDGGSTSETPQPPRKKRARVDPTVENEETFMNRVEVKVKIPEELKPWLVDDWDLITRQKQLFYLPAKKNVDSILEDYANYKKSRGNTDNKEYAVNEVVAGIKEYFNVMLGTQLLY

SEQ ID NO: 30579 - protein, 331 aa, Artificial Sequence
  Synthetic polypeptide
TRESEVAVGRDPAIALQPGPQSERVLCFHGPLLYEAKCVKVAIKDKQVKYFIHYSGWNKNWDEWVPESRVLKYVDTNLQKQRELQKANQEQYAEGKMRGAAPGKKTSGLQQKNVEVKTKKNKQKTPGNGDGGSTSETPQPPRKKRARVDPTVENEETFMNRVEVKVKIPEELKPWLVDDWDLITRQKQLFYLPAKKNVDSILEDYANYKKSRGNTDNKEYAVNEVVAGIKEYFNVMLGTQLLYKFERPQYAEILADHPDAPMSQVYGAPHLLRLFVRIGAMLAYTPLDEKSLALLLNYLHDFLKYLAKNSATLFSASDYEVAPPEYHRKAV

SEQ ID NO: 30580 - protein, 277 aa, Artificial Sequence
  Synthetic polypeptide
TRESEVAVGRDPAIALQPGPQSERVLCFHGPLLYEAKCVKVAIKDKQVKYFIHYSGWNKNWDEWVPESRVLKYVDTNLQKQRELQKANQKTKKNKQKTPGNGDGGSTSETPQPPRKKRARVDPTVENEETFMNRVEVKVKIPEELKPWLVDDWDLITRQKQLFYLPAKKNVDSILEDYANYKKSRGNTDNKEYAVNEVVAGIKEYFNVMLGTQLLYKFERPQYAEILADHPDAPMSQVYGAPHLLRLFVRIGAMLAYTPLDEKSLALLLNYLHDFLK

SEQ ID NO: 30581 - protein, 36 aa, Artificial Sequence
  Synthetic polypeptide
IRDSEELIGRRWTRWSTICSQAEHLPPRDWDDWHPP

SEQ ID NO: 30582 - protein, 111 aa, Artificial Sequence
  Synthetic polypeptide
QHQEVTLYGLKWRVCPSTCGKRACTENNECCHPECLGSCSAPDNDTACVACRHYYYAGVCVPACPPNTYRFEGWRCVDRDFCANILSAESSDSEGFVIHDGECMQECPSGF

SEQ ID NO: 30583 - protein, 1166 aa, Artificial Sequence
  Synthetic polypeptide
QHQEVTLYGLKWRVCPSTCGKRACTENNECCHPECLGSCSAPDNDTACVACRHYYYAGVCVPACPPNTYRFEGWRCVDRDFCANILSAESSDSEGFVIHDGECMQECPSGFIRNGSQSMYCIPCEGPCPKVCEEEKKTKTIDSVTSAQMLQGCTIFKGNLLINIRRGNNIASELENFMGLIEVVTGYVKIRHSHALVSLSFLKNLRLILGEEQLEGNYSFYVLDNQNLQQLWDWDHRNLTIKAGKMYFAFNPKLCVSEIYRMEEVTGTKGRQSKGDINTRNNGERASCESDVLHFTSTTTSKNRIIITWHRYRPPDYRDLISFTVYYKEAPFKNVTEYDGQDACGSNSWNMVDVDLPPNKDVEPGILLHGLKPWTQYAVYVKAVTLTMVENDHIRGAKSEILYIRTNASVPSIPLDVLSASNSSSQLIVKWNPPSLPNGNLSYYIVRWQRQPQDGYLYRHNYCSKDKIPIRKYADGTIDIEEVTENPKTEVCGGEKGPCCACPKTEAEKQAEKEEAEYRKVFENFLHNSIFVPRPERKRRDVMQVANTTMSSRSRNTTAADTYNITDPEELETEYPFFESRVDNKERTVISNLRPFTLYRIDIHSCNHEAEKLGCSASNFVFARTMPAEGADDIPGPVTWEPRPENSIFLKWPEPENPNGLILMYEIKYGSQVEDQRECVSRQEYRKYGGAKLNRLNPGNYTARIQATSLSGNGSWTDPVFFYVQAKRYENFIHLIIALPVAVLLIVGGLVIMLYVFHRKRNNSRLGNGVLYASVNPEYFSAADVYVPDEWEVAREKITMSRELGQGSFGMVYEGVAKGVVKDEPETRVAIKTVNEAASMRERIEFLNEASVMKEFNCHHVVRLLGVVSQGQPTLVIMELMTRGDLKSYLRSLRPEMENNPVLAPPSLSKMIQMAGEIADGMAYLNANKFVHRDLAARNCMVAEDFTVKIGDFGMTRDIYETDYYRKGGKGLLPVRWMSPESLKDGVFTTYSDVWSFGVVLWEIATLAEQPYQGLSNEQVLRFVMEGGLLDKPDNCPDMLFELMRMCWQYNPKMRPSFLEIISSIKEEMEPGFREVSFYYSEENKLPEPEELDLEPENMESVPLDPSASSSSLPLPDRHSGHKAENGPGPGVLVLRASFDERQPYAHMNGGRKNERALPLPQSSTC

SEQ ID NO: 30584 - protein, 1167 aa, Artificial Sequence
  Synthetic polypeptide
QHQEVTLYGLKWRVCPSTCGKRACTENNECCHPECLGSCSAPDNDTACVACRHYYYAGVCVPACPPNTYRFEGWRCVDRDFCANILSAESSDSEGFVIHDGECMQECPSGFIRNGSQSMYCIPCEGPCPKVCEEEKKTKTIDSVTSAQMLQGCTIFKGNLLINIRRGNNIASELENFMGLIEVVTGYVKIRHSHALVSLSFLKNLRLILGEEQLEGNYSFYVLDNQNLQQLWDWDHRNLTIKAGKMYFAFNPKLCVSEIYRMEEVTGTKGRQSKGDINTRNNGERASCESDVLHFTSTTTSKNRIIITWHRYRPPDYRDLISFTVYYKEAPFKNVTEYDGQDACGSNSWNMVDVDLPPNKDVEPGILLHGLKPWTQYAVYVKAVTLTMVENDHIRGAKSEILYIRTNASVPSIPLDVLSASNSSSQLIVKWNPPSLPNGNLSYYIVRWQRQPQDGYLYRHNYCSKDKIPIRKYADGTIDIEEVTENPKTEVCGGEKGPCCACPKTEAEKQAEKEEAEYRKVFENFLHNSIFVPRPERKRRDVMQVANTTMSSRSRNTTAADTYNITDPEELETEYPFFESRVDNKERTVISNLRPFTLYRIDIHSCNHEAEKLGCSASNFVFARTMPAEGADDIPGPVTWEPRPENSIFLKWPEPENPNGLILMYEIKYGSQVEDQRECVSRQEYRKYGGAKLNRLNPGNYTARIQATSLSGNGSWTDPVFFYVQAKTGYENFIHLIIALPVAVLLIVGGLVIMLYVFHRKRNNSRLGNGVLYASVNPEYFSAADVYVPDEWEVAREKITMSRELGQGSFGMVYEGVAKGVVKDEPETRVAIKTVNEAASMRERIEFLNEASVMKEFNCHHVVRLLGVVSQGQPTLVIMELMTRGDLKSYLRSLRPEMENNPVLAPPSLSKMIQMAGEIADGMAYLNANKFVHRDLAARNCMVAEDFTVKIGDFGMTRDIYETDYYRKGGKGLLPVRWMSPESLKDGVFTTYSDVWSFGVVLWEIATLAEQPYQGLSNEQVLRFVMEGGLLDKPDNCPDMLFELMRMCWQYNPKMRPSFLEIISSIKEEMEPGFREVSFYYSEENKLPEPEELDLEPENMESVPLDPSASSSSLPLPDRHSGHKAENGPGPGVLVLRASFDERQPYAHMNGGRKNERALPLPQSSTC

SEQ ID NO: 30585 - protein, 1218 aa, Artificial Sequence
  Synthetic polypeptide
GQEIKTILANTVMARSLSPPPELEERDVAAYSASLEDVKTAVLGLLVILQTKLYTLPASHATRVYEMLVSHIQLHYKHSYTLPIASSIRLQAFDFLLLLRADSLHRLGLPNKDGVVRFSPYCVCDYMEPERGSEKKTSGPLSPPTGPPGPAPAGPAVRLGSVPYSLLFRVLLQCLKQESDWKVLKLVLGRLPESLRYKVLIFTSPCSVDQLCSALCSMLSGPKTLERLRGAPEGFSRTDLHLAVVPVLTALISYHNYLDKTKQREMVYCLEQGLIHRCASQCVVALSICSVEMPDIIIKALPVLVVKLTHISATASMAVPLLEFLSTLARLPHLYRNFAAEQYASVFAISLPYTNPSKFNQYIVCLAHHVIAMWFIRCRLPFRKDFVPFITKGLRSNVLLSFDDTPEKDSFRARSTSLNERPKRIQTSLTSASLGSADENSVAQADDSLKNLHLELTETCLDMMARYVFSNFTAVPKRSPVGEFLLAGGRTKTWLVGNKLVTVTTSVGTGTRSLLGLDSGELQSGPESSSSPGVHVRQTKEAPAKLESQAGQQVSRGARDRVRSMSGGHGLRVGALDVPASQFLGSATSPGPRTAPAAKPEKASAGTRVPVQEKTNLAAYVPLLTQGWAEILVRRPTGNTSWLMSLENPLSPFSSDINNMPLQELSNALMAAERFKEHRDTALYKSLSVPAASTAKPPPLPRSNTDSAVVMEEGSPGEVPVLVEPPGLEDVEAALGMDRRTDAYSRSSSVSSQEEKSLHAEELVGRGIPIERVVSSEGGRPSVDLSFQPSQPLSKSSSSPELQTLQDILGDPGDKADVGRLSPEVKARSQSGTLDGESAAWSASGEDSRGQPEGPLPSSSPRSPSGLRPRGYTISDSAPSRRGKRVERDALKSRATASNAEKVPGINPSFVFLQLYHSPFFGDESNKPILLPNESQSFERSVQLLDQIPSYDTHKIAVLYVGEGQSNSELAILSNEHGSYRYTEFLTGLGRLIELKDCQPDKVYLGGLDVCGEDGQFTYCWHDDIMQAVFHIATLMPTKDVDKHRCDKKRHLGNDFVSIVYNDSGEDFKLGTIKGQFNFVHVIVTPLDYECNLVSLQCRKDMEGLVDTSVAKIVSDRNLPFVARQMALHANMASQVHHSRSNPTDIYPSKWIARLRHIKRLRQRICEEAAYSNPSLPLVHPPSHSKAPAQTPAEPTPGYEVGQRKRLISSVEDFTEFV

SEQ ID NO: 30586 - protein, 1262 aa, Artificial Sequence
  Synthetic polypeptide
GQEIKTILANTVMARSLSPPPELEERDVAAYSASLEDVKTAVLGLLVILQTKLYTLPASHATRVYEMLVSHIQLHYKHSYTLPIASSIRLQAFDFLLLLRADSLHRLGLPNKDGVVRFSPYCVCDYMEPERGSEKKTSGPLSPPTGPPGPAPAGPAVRLGSVPYSLLFRVLLQCLKQESDWKVLKLVLGRLPESLRYKVLIFTSPCSVDQLCSALCSMLSGPKTLERLRGAPEGFSRTDLHLAVVPVLTALISYHNYLDKTKQREMVYCLEQGLIHRCASQCVVALSICSVEMPDIIIKALPVLVVKLTHISATASMAVPLLEFLSTLARLPHLYRNFAAEQYASVFAISLPYTNPSKFNQYIVCLAHHVIAMWFIRCRLPFRKDFVPFITKGLRSNVLLSFDDTPEKDSFRARSTSLNERPKSLRIARPPKQGLNNSPPVKEFKESSAAEAFRCRSISVSEHVVRSRIQTSLTSASLGSADENSVAQADDSLKNLHLELTETCLDMMARYVFSNFTAVPKRSPVGEFLLAGGRTKTWLVGNKLVTVTTSVGTGTRSLLGLDSGELQSGPESSSSPGVHVRQTKEAPAKLESQAGQQVSRGARDRVRSMSGGHGLRVGALDVPASQFLGSATSPGPRTAPAAKPEKASAGTRVPVQEKTNLAAYVPLLTQGWAEILVRRPTGNTSWLMSLENPLSPFSSDINNMPLQELSNALMAAERFKEHRDTALYKSLSVPAASTAKPPPLPRSNTDSAVVMEEGSPGEVPVLVEPPGLEDVEAALGMDRRTDAYSRSSSVSSQEEKSLHAEELVGRGIPIERVVSSEGGRPSVDLSFQPSQPLSKSSSSPELQTLQDILGDPGDKADVGRLSPEVKARSQSGTLDGESAAWSASGEDSRGQPEGPLPSSSPRSPSGLRPRGYTISDSAPSRRGKRVERDALKSRATASNAEKVPGINPSFVFLQLYHSPFFGDESNKPILLPNESQSFERSVQLLDQIPSYDTHKIAVLYVGEGQSNSELAILSNEHGSYRYTEFLTGLGRLIELKDCQPDKVYLGGLDVCGEDGQFTYCWHDDIMQAVFHIATLMPTKDVDKHRCDKKRHLGNDFVSIVYNDSGEDFKLGTIKGQFNFVHVIVTPLDYECNLVSLQCRKDMEGLVDTSVAKIVSDRNLPFVARQMALHANMASQVHHSRSNPTDIYPSKWIARLRHIKRLRQRICEEAAYSNPSLPLVHPPSHSKAPAQTPAEPTPGYEVGQRKRLISSVEDFTEFV

SEQ ID NO: 30587 - protein, 1285 aa, Artificial Sequence
  Synthetic polypeptide
GQEIKTILANTVMARSLSPPPELEERDVAAYSASLEDVKTAVLGLLVILQTKLYTLPASHATRVYEMLVSHIQLHYKHSYTLPIASSIRLQAFDFLLLLRADSLHRLGLPNKDGVVRFSPYCVCDYMEPERGSEKKTSGPLSPPTGPPGPAPAGPAVRLGSVPYSLLFRVLLQCLKQESDWKVLKLVLGRLPESLRYKVLIFTSPCSVDQLCSALCSMLSGPKTLERLRGAPEGFSRTDLHLAVVPVLTALISYHNYLDKTKQREMVYCLEQGLIHRCASQCVVALSICSVEMPDIIIKALPVLVVKLTHISATASMAVPLLEFLSTLARLPHLYRNFAAEQYASVFAISLPYTNPSKFNQYIVCLAHHVIAMWFIRCRLPFRKDFVPFITKGLRSNVLLSFDDTPEKDSFRARSTSLNERPKSLRIARPPKQGLNNSPPVKEFKESSAAEAFRCRSISVSEHVVRSRIQTSLTSASLGSADENSVAQADDSLKNLHLELTETCLDMMARYVFSNFTAVPKRSPVGEFLLAGGRTKTWLVGNKLVTVTTSVGTGTRSLLGLDSGELQSGPESSSSPGVHVRQTKEAPAKLESQAGQQVSRGARDRVRSMSGGHGLRVGALDVPASQFLGSATSPGPRTAPAAKPEKASAGTRVPVQEKTNLAAYVPLLTQGWAEILVRRPTGNTSWLMSLENPLSPFSSDINNMPLQELSNALMAAERFKEHRDTALYKSLSVPAASTAKPPPLPRSNTVASFSSLYQSSCQGQLHRSVSWADSAVVMEEGSPGEVPVLVEPPGLEDVEAALGMDRRTDAYSRSSSVSSQEEKSLHAEELVGRGIPIERVVSSEGGRPSVDLSFQPSQPLSKSSSSPELQTLQDILGDPGDKADVGRLSPEVKARSQSGTLDGESAAWSASGEDSRGQPEGPLPSSSPRSPSGLRPRGYTISDSAPSRRGKRVERDALKSRATASNAEKVPGINPSFVFLQLYHSPFFGDESNKPILLPNESQSFERSVQLLDQIPSYDTHKIAVLYVGEGQSNSELAILSNEHGSYRYTEFLTGLGRLIELKDCQPDKVYLGGLDVCGEDGQFTYCWHDDIMQAVFHIATLMPTKDVDKHRCDKKRHLGNDFVSIVYNDSGEDFKLGTIKGQFNFVHVIVTPLDYECNLVSLQCRKDMEGLVDTSVAKIVSDRNLPFVARQMALHANMASQVHHSRSNPTDIYPSKWIARLRHIKRLRQRICEEAAYSNPSLPLVHPPSHSKAPAQTPAEPTPGYEVGQRKRLISSVEDFTEFV

SEQ ID NO: 30588 - protein, 1219 aa, Artificial Sequence
  Synthetic polypeptide
GQEIKTILANTVMARSLSPPPELEERDVAAYSASLEDVKTAVLGLLVILQTKLYTLPASHATRVYEMLVSHIQLHYKHSYTLPIASSIRLQAFDFLLLLRADSLHRLGLPNKDGVVRFSPYCVCDYMEPERGSEKKTSGPLSPPTGPPGPAPAGPAVRLGSVPYSLLFRVLLQCLKQESDWKVLKLVLGRLPESLRYKVLIFTSPCSVDQLCSALCSMLSGPKTLERLRGAPEGFSRTDLHLAVVPVLTALISYHNYLDKTKQREMVYCLEQGLIHRCASQCVVALSICSVEMPDIIIKALPVLVVKLTHISATASMAVPLLEFLSTLARLPHLYRNFAAEQYASVFAISLPYTNPSKFNQYIVCLAHHVIAMWFIRCRLPFRKDFVPFITKGLRSNVLLSFDDTPEKDSFRARSTSLNERPKSRIQTSLTSASLGSADENSVAQADDSLKNLHLELTETCLDMMARYVFSNFTAVPKRSPVGEFLLAGGRTKTWLVGNKLVTVTTSVGTGTRSLLGLDSGELQSGPESSSSPGVHVRQTKEAPAKLESQAGQQVSRGARDRVRSMSGGHGLRVGALDVPASQFLGSATSPGPRTAPAAKPEKASAGTRVPVQEKTNLAAYVPLLTQGWAEILVRRPTGNTSWLMSLENPLSPFSSDINNMPLQELSNALMAAERFKEHRDTALYKSLSVPAASTAKPPPLPRSNTDSAVVMEEGSPGEVPVLVEPPGLEDVEAALGMDRRTDAYSRSSSVSSQEEKSLHAEELVGRGIPIERVVSSEGGRPSVDLSFQPSQPLSKSSSSPELQTLQDILGDPGDKADVGRLSPEVKARSQSGTLDGESAAWSASGEDSRGQPEGPLPSSSPRSPSGLRPRGYTISDSAPSRRGKRVERDALKSRATASNAEKVPGINPSFVFLQLYHSPFFGDESNKPILLPNESQSFERSVQLLDQIPSYDTHKIAVLYVGEGQSNSELAILSNEHGSYRYTEFLTGLGRLIELKDCQPDKVYLGGLDVCGEDGQFTYCWHDDIMQAVFHIATLMPTKDVDKHRCDKKRHLGNDFVSIVYNDSGEDFKLGTIKGQFNFVHVIVTPLDYECNLVSLQCRKDMEGLVDTSVAKIVSDRNLPFVARQMALHANMASQVHHSRSNPTDIYPSKWIARLRHIKRLRQRICEEAAYSNPSLPLVHPPSHSKAPAQTPAEPTPGYEVGQRKRLISSVEDFTEFV

SEQ ID NO: 30589 - protein, 1242 aa, Artificial Sequence
  Synthetic polypeptide
GQEIKTILANTVMARSLSPPPELEERDVAAYSASLEDVKTAVLGLLVILQTKLYTLPASHATRVYEMLVSHIQLHYKHSYTLPIASSIRLQAFDFLLLLRADSLHRLGLPNKDGVVRFSPYCVCDYMEPERGSEKKTSGPLSPPTGPPGPAPAGPAVRLGSVPYSLLFRVLLQCLKQESDWKVLKLVLGRLPESLRYKVLIFTSPCSVDQLCSALCSMLSGPKTLERLRGAPEGFSRTDLHLAVVPVLTALISYHNYLDKTKQREMVYCLEQGLIHRCASQCVVALSICSVEMPDIIIKALPVLVVKLTHISATASMAVPLLEFLSTLARLPHLYRNFAAEQYASVFAISLPYTNPSKFNQYIVCLAHHVIAMWFIRCRLPFRKDFVPFITKGLRSNVLLSFDDTPEKDSFRARSTSLNERPKSRIQTSLTSASLGSADENSVAQADDSLKNLHLELTETCLDMMARYVFSNFTAVPKRSPVGEFLLAGGRTKTWLVGNKLVTVTTSVGTGTRSLLGLDSGELQSGPESSSSPGVHVRQTKEAPAKLESQAGQQVSRGARDRVRSMSGGHGLRVGALDVPASQFLGSATSPGPRTAPAAKPEKASAGTRVPVQEKTNLAAYVPLLTQGWAEILVRRPTGNTSWLMSLENPLSPFSSDINNMPLQELSNALMAAERFKEHRDTALYKSLSVPAASTAKPPPLPRSNTVASFSSLYQSSCQGQLHRSVSWADSAVVMEEGSPGEVPVLVEPPGLEDVEAALGMDRRTDAYSRSSSVSSQEEKSLHAEELVGRGIPIERVVSSEGGRPSVDLSFQPSQPLSKSSSSPELQTLQDILGDPGDKADVGRLSPEVKARSQSGTLDGESAAWSASGEDSRGQPEGPLPSSSPRSPSGLRPRGYTISDSAPSRRGKRVERDALKSRATASNAEKVPGINPSFVFLQLYHSPFFGDESNKPILLPNESQSFERSVQLLDQIPSYDTHKIAVLYVGEGQSNSELAILSNEHGSYRYTEFLTGLGRLIELKDCQPDKVYLGGLDVCGEDGQFTYCWHDDIMQAVFHIATLMPTKDVDKHRCDKKRHLGNDFVSIVYNDSGEDFKLGTIKGQFNFVHVIVTPLDYECNLVSLQCRKDMEGLVDTSVAKIVSDRNLPFVARQMALHANMASQVHHSRSNPTDIYPSKWIARLRHIKRLRQRICEEAAYSNPSLPLVHPPSHSKAPAQTPAEPTPGYEVGQRKRLISSVEDFTEFV

SEQ ID NO: 30590 - protein, 60 aa, Artificial Sequence
  Synthetic polypeptide
DSLLRDQGWALGEFMNPRICRPGAAAAARHPGSPGGQLAPRGLPRAQLRSLGGAGGQTGG

SEQ ID NO: 30591 - protein, 181 aa, Artificial Sequence
  Synthetic polypeptide
DSLLRDQGWALGEFMNPRICRPGAAAAARHPGSPGGQLAPRGLPRAQLRSLGQRGRPLAGGAVGQIPWGTGRAAFLRCHIYPTQLPSLLVPPRGIEAGAGGQSGRGPGPCPLPAAGGTGGPQHAGPLQWHCQCCRRCSGGRQGGRLDWARGRHEEDHARLPAGGEVWAPGGRGRLAPLRPG

SEQ ID NO: 30592 - protein, 188 aa, Artificial Sequence
  Synthetic polypeptide
DSLLRDQGWALGEFMNPRICRPGAAAAARHPGSPGGQLAPRGLPRAQLRSLGQRGRPLAGGAVGQIPWGTGRAAFLRCHIYPTQLPSLLVPPRGIEAGAGGQSGRGPGPCPLPAAGGTGGPQHAGPLQWHCQCCRRCSGGRQGGRLDWARGRHEEDHARLPAGGEVWAPGGRGRLAPLRPGRAGDGEG

SEQ ID NO: 30593 - protein, 38 aa, Artificial Sequence
  Synthetic polypeptide
MESQLQIEETTLLRTFSWEERNSTPPTLKVTSLERTWI

SEQ ID NO: 30594 - protein, 50 aa, Artificial Sequence
  Synthetic polypeptide
SVIVSHHTQMGLSSFRKTSSGLPLILHCVYAKGTGLRNQETTRRRRKENH

SEQ ID NO: 30595 - protein, 30 aa, Artificial Sequence
  Synthetic polypeptide
KETFFLQQQGNDAKNGYHRPCHRPGVHEPS

SEQ ID NO: 30596 - protein, 60 aa, Artificial Sequence; identical to SEQ ID NO: 13410
  Synthetic polypeptide

SEQ ID NO: 30597 - protein, 117 aa, Artificial Sequence
  Synthetic polypeptide
MLADRSMSSSLSASQLHTVNMRDPLNRVLANLFLLISSILGSRTAGPHTQFVQWFMEECVDCLEQGGRGSVLQFMPFTTVSELVKVSAMSSPKVVLAITDLSLPLGRQVAAKAIAAL

SEQ ID NO: 30598 - protein, 36 aa, Artificial Sequence
  Synthetic polypeptide
MLADRSMSSSLSASQLHTVNMRDPLNRVLVPPSPRV

SEQ ID NO: 30599 - protein, 31 aa, Artificial Sequence; identical to SEQ ID NO: 13920
  Synthetic polypeptide

SEQ ID NO: 30600 - protein, 399 aa, Artificial Sequence
  Synthetic polypeptide
ELGRTAGGQQQALPLGSPRCDLKENLLKDNCAPESIEFPVSEARVLEDRPLSDKGSGDSSQVTQVSPQRIALRLRPDDSKNFSIQVRQVEDYPVDIYYLMDLSYSMKDDLWSIQNLGTKLATQMRKLTSNLRIGFGAFVDKPVSPYMYISPPEALENPCYDMKTTCLPMFGYKHVLTLTDQVTRFNEEVKKQSVSRNRDAPEGGFDAIMQATVCDEKIGWRNDASHLLVFTTDAKTHIALDGRLAGIVQPNDGQCHVGSDNHYSASTTMDYPSLGLMTEKLSQKNINLIFAVTENVVNLYQNYSELIPGTTVGVLSMDSSNVLQLIVDAYGKIRSKVELEVRDLPEELSLSFNATCLNNEVIPGLKSCMGLKIGDTVRWAGQGLCPGASVGTQPPFFLL

SEQ ID NO: 30601 - protein, 744 aa, Artificial Sequence
  Synthetic polypeptide
ELGRTAGGQQQALPLGSPRCDLKENLLKDNCAPESIEFPVSEARVLEDRPLSDKGSGDSSQVTQVSPQRIALRLRPDDSKNFSIQVRQVEDYPVDIYYLMDLSYSMKDDLWSIQNLGTKLATQMRKLTSNLRIGFGAFVDKPVSPYMYISPPEALENPCYDMKTTCLPMFGYKHVLTLTDQVTRFNEEVKKQSVSRNRDAPEGGFDAIMQATVCDEKIGWRNDASHLLVFTTDAKTHIALDGRLAGIVQPNDGQCHVGSDNHYSASTTMDYPSLGLMTEKLSQKNINLIFAVTENVVNLYQNYSELIPGTTVGVLSMDSSNVLQLIVDAYGKIRSKVELEVRDLPEELSLSFNATCLNNEVIPGLKSCMGLKIGDTVSFSIEAKVRGCPQEKEKSFTIKPVGFKDSLIVQVTFDCDCACQAQAEPNSHRCNNGNGTFECGVCRCGPGWLGSQCECSEEDYRPSQQDECSPREGQPVCSQRGECLCGQCVCHSSDFGKITGKYCECDDFSCVRYKGEMCSGHGQCSCGDCLCDSDWTGYYCNCTTRTDTCMSSNGLLCSGRGKCECGSCVCIQPGSYGDTCEKCPTCPDACTFKKECVECKKFDRGALHDENTCNRYCRDEIESVKELKDTGKDAVNCTYKNEDDCVVRFQYYEDSSGKSILYVVEEPECPKGPDILVVLLSVMGAILLIGLAALLIWKLLITIHDRKEFAKFEEERARAKWDTANNPLYKEATSTFTNITYRGT

SEQ ID NO: 30602 - protein, 754 aa, Artificial Sequence
  Synthetic polypeptide
ELGRTAGGQQQALPLGSPRCDLKENLLKDNCAPESIEFPVSEARVLEDRPLSDKGSGDSSQVTQVSPQRIALRLRPDDSKNFSIQVRQVEDYPVDIYYLMDLSYSMKDDLWSIQNLGTKLATQMRKLTSNLRIGFGAFVDKPVSPYMYISPPEALENPCYDMKTTCLPMFGYKHVLTLTDQVTRFNEEVKKQSVSRNRDAPEGGFDAIMQATVCDEKIGWRNDASHLLVFTTDAKTHIALDGRLAGIVQPNDGQCHVGSDNHYSASTTMDYPSLGLMTEKLSQKNINLIFAVTENVVNLYQNYSELIPGTTVGVLSMDSSNVLQLIVDAYGKIRSKVELEVRDLPEELSLSFNATCLNNEVIPGLKSCMGLKIGDTVSFSIEAKVRGCPQEKEKSFTIKPVGFKDSLIVQVTFDCDCACQAQAEPNSHRCNNGNGTFECGVCRCGPGWLGSQCECSEEDYRPSQQDECSPREGQPVCSQRGECLCGQCVCHSSDFGKITGKYCECDDFSCVRYKGEMCSGHGQCSCGDCLCDSDWTGYYCNCTTRTDTCMSSNGLLCSGRGKCECGSCVCIQPGSYGDTCEKCPTCPDACTFKKECVECKKFDRGALHDENTCNRYCRDEIESVKELKDTGKDAVNCTYKNEDDCVVRFQYYEDSSGKSILYVVEEPECPKGPDILVVLLSVMGAILLIGLAALLIWKLLITIHDRKEFAKFEEERARAKWDTEILLYYCSFILVHQSLESLRTEFTSKQKDGN

SEQ ID NO: 30603 - protein, 56 aa, Artificial Sequence
  Synthetic polypeptide
GRLDIGFPSLQNYRVLLCHSGWSTVTQSRFTAAWTSQLLRRLRHKNRLNPGGRGCS

SEQ ID NO: 30604 - protein, 30 aa, Artificial Sequence
  Synthetic polypeptide
LQENKLRAPTDSTLCTLCKKPGEKGFFPTS

SEQ ID NO: 30605 - protein, 22 aa, Artificial Sequence
  Synthetic polypeptide
MKKGNLLIISLDAKKVTPDDIN

SEQ ID NO: 30606 - protein, 4928 aa, Artificial Sequence; identical to SEQ ID NO: 14389
  Synthetic polypeptide

SEQ ID NO: 30607 - protein, 1271 aa, Artificial Sequence; identical to SEQ ID NO: 14395
  Synthetic polypeptide

SEQ ID NO: 30608 - protein, 784 aa, Artificial Sequence; identical to SEQ ID NO: 14396
  Synthetic polypeptide

SEQ ID NO: 30609 - protein, 48 aa, Artificial Sequence
  Synthetic polypeptide
GLEFETSLANVVQLPNSIVFSVTRHLKAVITGRHHEIILCLSVIPIWR

SEQ ID NO: 30610 - protein, 360 aa, Artificial Sequence
  Synthetic polypeptide
EWSGIQKATLMDLQLSDSNFRRHILLQYLILFQYLKGQVKFKSSNYVLTDEQSLWIEDTTKSVYQLLSENPPDGERFSKMVEHILNTEENWNSWKNEGCPSFVKERTSDTKPTRIIRKRTAPEDFLGKGPTKKILMGNEELTRLWNLCPDNMEACKSETREHMPTLEEFFEEAIEQADPENMVENEYKAVNNSNYGWRALRLLARRSPHFFQPTNQQFKSLPEYLENMVIKLAKELPPPSEEIKTGEDEDEEDNDALLKENESPDVRRDKPVTGEQIEVFANKLGEQWKILAPYLEMKDSEIRQIECDSEDMKMRAKQLLVAWQDQEGVHATPENLINALNKSGLSDLAESLTNDNETNS

SEQ ID NO: 30611 - protein, 244 aa, Artificial Sequence
  Synthetic polypeptide
EWSGIQKATLMDLQLSDSNFRRHILLQYLILFQYLKGQVKFKSSNYVLTDEQSLWIEDTTKSVYQLLSENPPDGERFSKMVEHILNTEENWNSWKNEGCPSFVKESVCFVHDRTSDTKPTRIIRKRTAPEDFLGKGPTKKILMGNEELTRLWNLCPDNMEACKSETREHMPTLEEFFEEAIEQADPENMVENEYKAVNNSNYGWRALRLLARRSPHFFQPTNQQFKSLPEYLENMVIKLAKELP

SEQ ID NO: 30612 - protein, 369 aa, Artificial Sequence
  Synthetic polypeptide
RSLQPSANKRRRKTLQEKLVSLSQYWEKNLICSECGDEFTLQSQLAVHMEEHRQELAGTRQHACKACKKEFETSSELKEHMKTHYKIRVSSTRSYNRNIDRSGFTYSCPHCGKTFQKPSQLTRHIRIHTGERPFKCSECGKAFNQKGALQTHMIKHTGEKPHACAFCPAAFSQKGNLQSHVQRVHSEVKNGPTYNCTECSCVFKSLGSLNTHISKMHMGGPQNSTSSTETAHVLTATLFQTLPLQQTEAQATSASSQPSSQAVSDVIQQLLELSEPAPVESGQSPQPGQQLSITVGINQDILQQALENSGLSSIPAAAHPNDSCHAKTSAPHAQNPDVSSVSNEQTDPTDAEQEKEQESPEKLDKKEKK

SEQ ID NO: 30613 - protein, 1754 aa, Artificial Sequence
  Synthetic polypeptide
RSLQPSANKRRRKTLQEKLVSLSQYWEKNLICSECGDEFTLQSQLAVHMEEHRQELAGTRQHACKACKKEFETSSELKEHMKTHYKIRVSSTRSYNRNIDRSGFTYSCPHCGKTFQKPSQLTRHIRIHTGERPFKCSECGKAFNQKGALQTHMIKHTGEKPHACAFCPAAFSQKGNLQSHVQRVHSEVKNGPTYNCTECSCVFKSLGSLNTHISKMHMGGPQNSTSSTETAHVLTATLFQTLPLQQTEAQATSASSQPSSQAVSDVIQQLLELSEPAPVESGQSPQPGQQLSITVGINQDILQQALENSGLSSIPAAAHPNDSCHAKTSAPHAQNPDVSSVSNEQTDPTDAEQEKEQESPEKLDKKEKKMIKKKSPFLPGSIREENGVRWHVCPYCAKEFRKPSDLVRHIRIHTHEKPFKCPQCFRAFAVKSTLTAHIKTHTGIKAFKCQYCMKSFSTSGSLKVHIRLHTGVRPFACPHCDKKFRTSGHRKTHIASHFKHTELRKMRHQRKPAKVRVGKTNIPVPDIPLQEPILITDLGLIQPIPKNQFFQSYFNNNFVNEADRPYKCFYCHRAYKKSCHLKQHIRSHTGEKPFKCSQCGRGFVSAGVLKAHIRTHTGLKSFKCLICNGAFTTGGSLRRHMGIHNDLRPYMCPYCQKTFKTSLNCKKHMKTHRYELAQQLQQHQQAASIDDSTVDQQSMQASTQMQVEIESDELPQTAEVVAANPEAMLDLEPQHVVGTEEAGLGQQLADQPLEADEDGFVAPQDPLRGHVDQFEEQSPAQQSFEPAGLPQGFTVTDTYHQQPQFPPVQQLQDSSTLESQALSTSFHQQSLLQAPSSDGMNVTTRLIQESSQEELDLQAQGSQFLEDNEDQSRRSYRCDYCNKGFKKSSHLKQHVRSHTGEKPYKCKLCGRGFVSSGVLKSHEKTHTGVKAFSCSVCNASFTTNGSLTRHMATHMSMKPYKCPFCEEGFRTTVHCKKHMKRHQTVPSAVSATGETEGGDICMEEEEEHSDRNASRKSRPEVITFTEEETAQLAKIRPQESATVSEKVLVQSAAEKDRISELRDKQAELQDEPKHANCCTYCPKSFKKPSDLVRHVRIHTGEKPYKCDECGKSFTVKSTLDCHVKTHTGQKLFSCHVCSNAFSTKGSLKVHMRLHTGAKPFKCPHCELRFRTSGRRKTHMQFHYKPDPKKARKPMTRSSSEGLQPVNLLNSSSTDPNVFIMNNSVLTGQFDQNLLQPGLVGQAILPASVSAGGDLTVSLTDGSLATLEGIQLQLAANLVGPNVQISGIDAASINNITLQIDPSILQQTLQQGNLLAQQLTGEPGLAPQNSSLQTSDSTVPASVVIQPISGLSLQPTVTSANLTIGPLSEQDSVLTTNSSGTQDLTQVMTSQGLVSPSGGPHEITLTINNSSLSQVLAQAAGPTATSSSGSPQEITLTISELNTTSGSLPSTTPMSPSAISTQNLVMSSSGVGGDASVTLTLADTQGMLSGGLDTVTLNITSQGQQFPALLTDPSLSGQGGAGSPQVILVSHTPQSASAACEEIAYQVAGVSGNLAPGNQPEKEGRAHQCLECDRAFSSAAVLMHHSKEVHGRERIHGCPVCRKAFKRATHLKEHMQTHQAGPSLSSQKPRVFKCDTCEKAFAKPSQLERHSRIHTGERPFHCTLCEKAFNQKSALQVHMKKHTGERPYKCAYCVMGFTQKSNMKLHMKRAHSYAGALQESAGHPEQDGEELSRTLHLEEVVQEAAGEWQALTHVF

SEQ ID NO: 30614 - protein, 1467 aa, Artificial Sequence
  Synthetic polypeptide
RSLQPSANKRRRKTLQEKLVSLSQYWEKNLICSECGDEFTLQSQLAVHMEEHRQELAGTRQHACKACKKEFETSSELKEHMKTHYKIRVSSTRSYNRNIDRSGFTYSCPHCGKTFQKPSQLTRHIRIHTGERPFKCSECGKAFNQKGALQTHMIKHTGEKPHACAFCPAAFSQKGNLQSHVQRVHSEVKNGPTYNCTECSCVFKSLGSLNTHISKMHMGGPQNSTSSTETAHVLTATLFQTLPLQQTEAQATSASSQPSSQAVSDVIQQLLELSEPAPVESGQSPQPGQQLSITVGINQDILQQALENSGLSSIPAAAHPNDSCHAKTSAPHAQNPDVSSVSNEQTDPTDAEQEKEQESPEKLDKKEKKMIKKKSPFLPGSIREENGVRWHVCPYCAKEFRKPSDLVRHIRIHTHEKPFKCPQCFRAFAVKSTLTAHIKTHTGIKAFKCQYCMKSFSTSGSLKVHIRLHTGVRPFACPHCDKKFRTSGHRKTHIASHFKHTELRKMRHQRKPAKVRVGKTNIPVPDIPLQEPILITDLGLIQPIPKNQFFQSYFNNNFVNEADRPYKCFYCHRAYKKSCHLKQHIRSHTGEKPFKCSQCGRGFVSAGVLKAHIRTHTGLKSFKCLICNGAFTTGGSLRRHMGIHNDLRPYMCPYCQKTFKTSLNCKKHMKTHRYELAQQLQQHQQAASIDDSTVDQQSMQASTQMQVEIESDELPQTAEVVAANPEAMLDLEPQHVVGTEEAGLGQQLADQPLEADEDGFVAPQDPLRGHVDQFEEQSPAQQSFEPAGLPQGFTVTDTYHQQPQFPPVQQLQDSSTLESQALSTSFHQQSLLQAPSSDGMNVTTRLIQESSQEELDLQAQGSQFLEDNEDQSRRSYRCDYCNKGFKKSSHLKQHVRSHTGEKPYKCKLCGRGFVSSGVLKSHEKTHTGVKAFSCSVCNASFTTNGSLTRHMATHMSMKPYKCPFCEEGFRTTVHCKKHMKRHQTVPSAVSATGETEGGDICMEEEEEHSDRNASRKSRPEVITFTEEETAQLAKIRPQESATVSEKVLVQSAAEKDRISELRDKQAELQDEPKHANCCTYCPKSFKKPSDLVRHVRIHTGEKPYKCDECGKSFTVKSTLDCHVKTHTGQKLFSCHVCSNAFSTKGSLKVHMRLHTGAKPFKCPHCELRFRTSGRRKTHMQFHYKPDPKKARKPMTRSSSEGLQPVNLLNSSSTDPNVFIMNNSVLTGQFDQNLLQPGLVGQAILPASVSAGGDLTVSLTDGSLATLEGIQLQLAANLVGPNVQISGIDAASINNITLQIDPSILQQTLQQGNLLAQQLTGEPGLAPQNSSLQTSDSTVPASVVIQPISGLSLQPTVTSANLTIGPLSEQDSVLTTNSSGTQDLTQVMTSQGLVSPSGGPHEITLTINNSSLSQVLAQAAGPTATSSSGSPQEITLTISGSRSVQHSVGPQECGSVEALYLENSSDKT

SEQ ID NO: 30615 - protein, 1557 aa, Artificial Sequence
  Synthetic polypeptide
STNDELDELRAEMEEMRDSYLEEDVYQLQELRRELDRANKNCRILQYRLRKAEQKSLKVAETGQVDGELIRSLEQDLKVAKDVSVRLHHELKTVEEKRAKAEDENETLRQQMIEVEISKQALQNELERLKESSLKRRSTREMYKEKKTFNQDDSADLRCQLQFAKEEAFLMRKKMAKLGREKDELEQELQKYKSLYGDVDSPLPTGEAGGPPSTREAELKLRLKLVEEEANILGRKIVELEVENRGLKAEMEDMRGQQEREGPGRDHAPSIPTSPFGDSLESSTELRRHLQFVEEEAELLRRSISEIEDHNRQLTHELSKFKFEPPREPGWLGEGASPGAGGGAPLQEELKSARLQISELSGKVLKLQHENHALLSNIQRCDLAAHLGLRAPSPRDSDAESDAGKKESDGEESRLPQPKREGPVGGESDSEEMFEKTSGFGSGKPSEASEPCPTELLKAREDSEYLVTLKHEAQRLERTVERLITDTDSFLHDAGLRGGAPLPGPGLQGEEEQGEGDQQEPQLLGTINAKMKAFKKELQAFLEQVNRIGDGLSPLPHLTESSSFLSTVTSVSRDSPIGNLGKELGPDLQSRLKEQLEWQLGPARGDERESLRLRAARELHRRADGDTGSHGLGGQTCFSLEMEEEHLYALRWKELEMHSLALQNTLHERTWSDEKNLMQQELRSLKQNIFLFYVKLRWLLKHWRQGKQMEEEGEEFTEGEHPETLSRLGELGVQGGHQADGPDHDSDRGCGFPVGEHSPHSRVQIGDHSLRLQTADRGQPHKQVVENQQLFSAFKALLEDFRAELREDERARLRLQQQYASDKAAWDVEWAVLKCRLEQLEEKTENKLGELGSSAESKGALKKEREVHQKLLADSHSLVMDLRWQIHHSEKNWNREKVELLDRLDRDRQEWERQKKEFLWRIEQLQKENSPRRGGSFLCDQKDGNVRPFPHQGSLRMPRPVAMWPCADADSIPFEDRPLSKLKESDRCSASENLYLDALSLDDEPEEPPAHRPEREFRNRLPEEEENHKGNLQRAVSVSSMSEFQRLMDISPFLPEKGLPSTSSKEDVTPPLSPDDLKYIEEFNKSWDYTPNRGHNGGGPDLWADRTEVGRAGHEDSTEPFPDSSWYLTTSVTMTTDTMTSPEHCQKQPLRSHVLTEQSGLRVLHSPPAVRRVDSITAAGGEGPFPTSRARGSPGDTKGGPPEPMLSRWPCTSPRHSRDYVEGARRPLDSPLCTSLGFASPLHSLEMSKNLSDDMKEVAFSVRNAICSGPGELQVKDMACQTNGSRTMGTQTVQTISVGLQTEALRGSGVTSSPHKCLTPKAGGGATPVSSPSRSLRSRQVAPAIEKVQAKFERTCCSPKYGSPKLQRKPLPKADQPNNRTSPGMAQKGYSESAWARSTTTRESPVHTTINDGLSSLFNIIDHSPVVQDPFQKGLRAGSRSRSAEPRPELGPGQETGTNSRGRSPSPIGVGSEMCREEGGEGTPVKQDLSAPPGYTLTENVARILNKKLLEHALKEERRQAAHGPPGLHSDSHSLGDTAEPGPMENQTVLLTAPWGL

SEQ ID NO: 30616 - protein, 282 aa, Artificial Sequence
  Synthetic polypeptide
GQVLGPWPSRGPPDRPALRVGRLRVPARPGGACSRPRAQRRQPPGRPLPAADALSVLCGRRVPACAEPVAAALPDAGLDLLRDTDSEGRGAGEGDAAAGHHARHGAQPRGALARLVPQLPRALPAQRRTAGSGAQAGRHPPLQPPGRGLPVLGSLRGGHGDPELPAQRLLLPRQPGCGLRRPGLLLPLPALRAVCGLAGPAARGWPRGREPAVARGLRLRLREPGSAGGAGRGRAVAQRGHPAYGRRLQPGPGLWPSAAGRGALRPRHLVPGSCVPRPVRDP

SEQ ID NO: 30617 - protein, 96 aa, Artificial Sequence
  Synthetic polypeptide
QNILLGPKTLTFLGPLQFRDVAIEFSLEEWHCLDTAQRNLYRNVMLENYSNLVFLGIVVSKPDLIAHLEQGKKPLTMKRHEMVANPSDGVNLCHPG

SEQ ID NO: 30618 - protein, 135 aa, Artificial Sequence
  Synthetic polypeptide
QNILLGPKTLTFLGPLQFRDVAIEFSLEEWHCLDTAQRNLYRNVMLENYSNLVFLGIVVSKPDLIAHLEQGKKPLTMKRHEMVANPSGARLLSQHFGRPRWVDPEVRRSRPSGQHGEIPSLLKYKKLARHGGPCL

SEQ ID NO: 30619 - protein, 131 aa, Artificial Sequence
  Synthetic polypeptide
QNILLGPKTLTFLGPLQFRDVAIEFSLEEWHCLDTAQRNLYRNVMLENYSNLVFLGIVVSKPDLIAHLEQGKKPLTMKRHEMVANPSGPGVVVVLMCNPRILGGQAKRIPGAQKFENSLGNIWRPLSMKKI

SEQ ID NO: 30620 - protein, 632 aa, Artificial Sequence
  Synthetic polypeptide
QNILLGPKTLTFLGPLQFRDVAIEFSLEEWHCLDTAQRNLYRNVMLENYSNLVFLGIVVSKPDLIAHLEQGKKPLTMKRHEMVANPSVICSHFAQDLWPEQNIKDSFQKVILRRYEKRGHGNLQLIKRCESVDECKVHTGGYNGLNQCSTTTQSKVFQCDKYGKVFHKFSNSNRHNIRHTEKKPFKCIECGKAFNQFSTLITHKKIHTGEKPYICEECGKAFKYSSALNTHKRIHTGEKPYKCDKCDKAFIASSTLSKHEIIHTGKKPYKCEECGKAFNQSSTLTKHKKIHTGEKPYKCEECGKAFNQSSTLTKHKKIHTGEKPYVCEECGKAFKYSRILTTHKRIHTGEKPYKCNKCGKAFIASSTLSRHEFIHMGKKHYKCEECGKAFIWSSVLTRHKRVHTGEKPYKCEECGKAFKYSSTLSSHKRSHTGEKPYKCEECGKAFVASSTLSKHEIIHTGKKPYKCEECGKAFNQSSSLTKHKKIHTGEKPYKCEECGKAFNQSSSLTKHKKIHTGEKPYKCEECGKAFNQSSTLIKHKKIHTREKPYKCEECGKAFHLSTHLTTHKILHTGEKPYRCRECGKAFNHSATLSSHKKIHSGEKPYECDKCGKAFISPSSLSRHEIIHTGEKP

SEQ ID NO: 30621 - protein, 30 aa, Artificial Sequence
  Synthetic polypeptide
ATRRCPETFLDGTLGRGCSWLAMGFIQCPG

SEQ ID NO: 30622 - protein, 330 aa, Artificial Sequence
  Synthetic polypeptide
MDFMNAEILLKLINLGKLPPDAKPPVNLLYNPTSIYNAWLSGLPQHIKSMVLREVTECNIETQFLKASEGPKFAFLSFVEAMSFLPPSVFWSFIFFLMLLAMGLSSAIGIMQGIITPLQDTFSFFRKHTKLLIVGVFLLMFVCGLFFTRPSGSYFIRLLSDYWIVFPIIVVVVFETMAVSWAYGARRFLADLTILLGHPISPIFGWLWPHLCPVVLLIIFVTMMVHLCMKPITYMSWDSSTSKEVLRPYPPWALLLMITLFAIVILPIPAYFVYCRIHRIPFRPKSGDGPMTASTSLPLSHQLTPSKEVQKEEILQVDETKYPSTCNVTS

SEQ ID NO: 30623 - protein, 253 aa, Artificial Sequence
  Synthetic polypeptide
MDFMNAEILLKLINLGKLPPDAKPPVNLLYNPTSIYNAWLSGLPQHIKSMVLREVTECNIETQFLKASEGPKFAFLSFVEAMSFLPPSVFWSFIFFLMLLAMGLSSAIGIMQGIITPLQDTFSFFRKHTKLLIVGVFLLMFVCGLFFTRPSGSYFIRLLSDYWIVFPIIVVVVFETMAVSWAYGARRFLADLTILLGHPISPIFGWLWPHLCPVVLLIIFVTMMVHLCMKPITYMSWDSSTVSLPQDPEPLWE

SEQ ID NO: 30624 - protein, 174 aa, Artificial Sequence
  Synthetic polypeptide
GVDQKGPAPEPPSMRLKARPSSPGFSVLTCSAFSFYPPELQLRFLRNGLAAGTGQGDFGPNSDGSFHASSSLTVKSGDEHHYCCIVQHAGLAQPLRVELESPAKSSVLVVGIVIGVLLLTAAAVGGALLWRRMRSGLPAPWISLRGDDTGVLLPTPGEAQDADLKDVNVIPATA

SEQ ID NO: 30625 - protein, 83 aa, Artificial Sequence
  Synthetic polypeptide
FLQQCLLLLVSLEVFRHSVRALLQRVSPEPPPAPRLTYEYSWSLGCGVGAGLILLLGAGCFLLLTLPSWPWGSLCPKRGHRAT

SEQ ID NO: 30626 - protein, 53 aa, Artificial Sequence
  Synthetic polypeptide
WAQWLTSVIPALWEAKAGGSLEAKSLRPAWAMGQATDIAIQAEEIMKLKKQLY

SEQ ID NO: 30627 - protein, 70 aa, Artificial Sequence
  Synthetic polypeptide
WAQWLTSVIPALWEAKAGGSLEAKSLRPAWAMGQATDIAIQAEEIMKLKKQLYNIYAKHTKQSLQVIESA

SEQ ID NO: 30628 - protein, 124 aa, Artificial Sequence
  Synthetic polypeptide
WAQWLTSVIPALWEAKAGGSLEAKSLRPAWAMGQATDIAIQAEEIMKLKKQLYNIYAKHTKQSLQVIESAMERDRYMSPMEAQEFGILDKVLVHPPQDGEDEPTLVQKEPVEAAPAAEPVPAST

SEQ ID NO: 30629 - protein, 19 aa, Artificial Sequence
  Synthetic polypeptide
QAWWIMPIIPALWEAKLCL

SEQ ID NO: 30630 - protein, 28 aa, Artificial Sequence
  Synthetic polypeptide
QAWWIMPIIPALWEAKLCLEKGAVRHRR

SEQ ID NO: 30631 - protein, 160 aa, Artificial Sequence
  Synthetic polypeptide
IVAPVIPTCHWRDLVGGYTPGTPYKVSCSPTSGAVPPYSSSPNPYQTAVYPVRSAYPQQSPYAQQGTYYTQPLYAAPPHVIHHTTVVQPNGMPATVYPAPIPPPRGNGVTMGMVAGTTMAMSAGTLLTAHSPTPVAPHPVTVPTYRAPGTPTYSYVPPQW

SEQ ID NO: 30632 - protein, 44 aa, Artificial Sequence
  Synthetic polypeptide
REGDVVLYCSSATFCATSQSGTGEVRCHIHACQASGGCPAEDGR

SEQ ID NO: 30633 - protein, 14 aa, Artificial Sequence
  Synthetic polypeptide
CNPSTLGDQAEKLG

SEQ ID NO: 30634 - protein, 29 aa, Artificial Sequence
  Synthetic polypeptide
GFPSHMSLGYHFQCPIPRTASRFYLWRRC

SEQ ID NO: 30635 - protein, 29 aa, Artificial Sequence
  Synthetic polypeptide
IQKRNNKAKSWFAVWGKGGEFAPSWDCKP

SEQ ID NO: 30636 - protein, 33 aa, Artificial Sequence
  Synthetic polypeptide
IQKRNNKAKSWFAVWGKGGEFAPSWDCKPGMYV

SEQ ID NO: 30637 - protein, 150 aa, Artificial Sequence
  Synthetic polypeptide
MATVAHTSLATVEDFQIRPHTLYVHSYKAPTFCDYCGEMLWGLVRQGLKCEGCGLNYHKRCAFKIPNNCSGVRKRRLSNVSLPGPGLSVPRPLQPEYVALPSEESHVHQEPSKRIPSWSGRPIWMEKMVMCRVKVPHTFAVHSYTRPTIC

SEQ ID NO: 30638 - protein, 755 aa, Artificial Sequence
  Synthetic polypeptide
MATVAHTSLATVEDFQIRPHTLYVHSYKAPTFCDYCGEMLWGLVRQGLKCEGCGLNYHKRCAFKIPNNCSGVRKRRLSNVSLPGPGLSVPRPLQPEYVALPSEESHVHQEPSKRIPSWSGRPIWMEKMVMCRVKVPHTFAVHSYTRPTICQYCKRLLKGLFRQGMQCKDCKFNCHKRCASKVPRDCLGEVTFNGEPSSLGTDTDIPMDIDNNDINSDSSRGLDDTEEPSPPEDKMFFLDPSDLDVERDEEAVKTISPSTSNNIPLMRVVQSIKHTKRKSSTMVKEGWMVHYTSRDNLRKRHYWRLDSKCLTLFQNESGSKYYKEIPLSEILRISSPRDFTNISQGSNPHCFEIITDTMVYFVGENNGDSSHNPVLAATGVGLDVAQSWEKAIRQALMPVTPQASVCTSPGQGKDHKDLSTSISVSNCQIQENVDISTVYQIFADEVLGSGQFGIVYGGKHRKTGRDVAIKVIDKMRFPTKQESQLRNEVAILQNLHHPGIVNLECMFETPERVFVVMEKLHGDMLEMILSSEKSRLPERITKFMVTQILVALRNLHFKNIVHCDLKPENVLLASAEPFPQVKLCDFGFARIIGEKSFRRSVVGTPAYLAPEVLRSKGYNRSLDMWSVGVIIYVSLSGTFPFNEDEDINDQIQNAAFMYPPNPWREISGEAIDLINNLLQVKMRKRYSVDKSLSHPWLQDYQTWLDLREFETRIGERYITHESDDARWEIHAYTHNLVYPKHFIMAPNPDDMEEDP

SEQ ID NO: 30639 - protein, 99 aa, Artificial Sequence; identical to SEQ ID NO: 18288
  Synthetic polypeptide

SEQ ID NO: 30640 - protein, 89 aa, Artificial Sequence; identical to SEQ ID NO: 18388
  Synthetic polypeptide

SEQ ID NO: 30641 - protein, 104 aa, Artificial Sequence; identical to SEQ ID NO: 18389
  Synthetic polypeptide

SEQ ID NO: 30642 - protein, 69 aa, Artificial Sequence; identical to SEQ ID NO: 18391
  Synthetic polypeptide

SEQ ID NO: 30643 - protein, 42 aa, Artificial Sequence
  Synthetic polypeptide
ICLLWTYHKWNHTICDPLGLEKGRGARRAVTANGYQMLDGKS

SEQ ID NO: 30644 - protein, 28 aa, Artificial Sequence
  Synthetic polypeptide
MGTVAHAYNPSTLGGRESDIDAAAAMML

SEQ ID NO: 30645 - protein, 213 aa, Artificial Sequence
  Synthetic polypeptide
MGTVAHAYNPSTLGGRESDIDAAAAMMLLNTSIEQGILECEKPLPLKTALQKKRSYGNAFHHPSAVRLQESDSLATSIDPKEDHNYSASSMAAQRCASRSSVSSLSSVDEVYEFIPKNSHVGSDGSEGFHSEEDTDVDYEDDPLGDSGYASQPCAKISEKGQSGKKMRKQTCQEIDEELKEAAGSLLHLAGIRTCLGSLISTAKTQNQKQRKK

SEQ ID NO: 30646 - protein, 55 aa, Artificial Sequence
  Synthetic polypeptide
GQELKTSLANMVVFPLMKSRRLGWRGRSCWLQRRDWTHTMYWPQRELQAPGKTLI

SEQ ID NO: 30647 - protein, 57 aa, Artificial Sequence
  Synthetic polypeptide
MELTIPGVGHSSGSLNEGKSPRQCLKEGYCNSLKYAFFECKRSVLDNRARFRGRKGY

SEQ ID NO: 30648 - protein, 56 aa, Artificial Sequence
  Synthetic polypeptide
MELTIPGVGHSSGSLNEGKSPRQCLKEGYCNSLKYAFFECKRSVMESRSVARAGVQ

SEQ ID NO: 30649 - protein, 48 aa, Artificial Sequence
  Synthetic polypeptide
MELTIPGVGKSPRQCLKEGYCNSLKYAFFECKRSVLDNRARFRGRKGY

SEQ ID NO: 30650 - protein, 47 aa, Artificial Sequence
  Synthetic polypeptide
MELTIPGVGKSPRQCLKEGYCNSLKYAFFECKRSVMESRSVARAGVQ

SEQ ID NO: 30651 - protein, 48 aa, Artificial Sequence; identical to SEQ ID NO: 18740
  Synthetic polypeptide

SEQ ID NO: 30652 - protein, 47 aa, Artificial Sequence; identical to SEQ ID NO: 18745
  Synthetic polypeptide

SEQ ID NO: 30653 - protein, 36 aa, Artificial Sequence
  Synthetic polypeptide
MGRDSLHCRIVGRIKGQIGILLWNSMGTMQQPRAER

SEQ ID NO: 30654 - protein, 45 aa, Artificial Sequence
  Synthetic polypeptide
MGRDSLHCRIVGRIKGQIGILLWNSMGTMQQPRAERARNASTAGS

SEQ ID NO: 30655 - protein, 429 aa, Artificial Sequence
  Synthetic polypeptide
MLAPENSDIGLAAWGRKALDIAENEMPGLMRMRERYSASKPLKGARIAGCLHMTVETAVLIETLVTLGAEVQWSSCNIFSTQDHAAAAIAKAGIPVYAWKGETDEEYLWCIEQTLYFKDGPLNMILDDGGDLTNLIHTKYPQLLPGIRGISEETTTGVHNLYKMMANGILKVPAINVNDSVTKSKFDNLYGCRESLIDGIKRATDVMIAGKVAVVAGYGDVGKGCAQALRGFGARVIITEIDPINALQAAMEGYEVTTMDEACQEGNIFVTTTGCIDIILGRHFEQMKDDAIVCNIGHFDVEIDVKWLNENAVEKVNIKPQVDRYRLKNGRRIILLAEGRLVNLGCAMGHPSFVMSNSFTNQVMAQIELWTHPDKYPVGVHFLPKKLDEAVAEAHLGKLNVKLTKLTEKQAQYLGMSCDGPFKPDHYRY

SEQ ID NO: 30656 - protein, 62 aa, Artificial Sequence
  Synthetic polypeptide
SQHFGRLREPIDNLTPEERDARTVFCMQLAARIRPRDLEEFFSTVGKVRDVRMISDRNSRRS

SEQ ID NO: 30657 - protein, 101 aa, Artificial Sequence
  Synthetic polypeptide
SQHFGRLREPIDNLTPEERDARTVFCMQLAARIRPRDLEEFFSTVGKVRDVRMISDRNSRRSKGIAYVEFVDVSSVPLAIGLTGQRVLGVPIIVQASQAEK

SEQ ID NO: 30658 - protein, 332 aa, Artificial Sequence
  Synthetic polypeptide
SQHFGRLREPIDNLTPEERDARTVFCMQLAARIRPRDLEEFFSTVGKVRDVRMISDRNSRRSKGIAYVEFVDVSSVPLAIGLTGQRVLGVPIIVQASQAEKNRAAAMANNLQKGSAGPMRLYVGSLHFNITEDMLRGIFEPFGRFSDSECAKKALEQLNGFELAGRPMKVGHVTERTDASSASSFLDSDELERTGIDLGTTGRLQLMARLAEGTGLQIPPAAQQALQMSGSLAFGAVAEFSFVIDLQTRLSQQTEASALAAAASVQPLATQCFQLSNMFNPQTEEEVGWDTEIKDDVIEECNKHGGVIHIYVDKNSAQGNVYVKCPSIAAAI

SEQ ID NO: 30659 - protein, 292 aa, Artificial Sequence
  Synthetic polypeptide
SQHFGRLREPIDNLTPEERDARTVFCMQLAARIRPRDLEEFFSTVGKVRDVRMISDRNSRRSKGIAYVEFVDVSSVPLAIGLTGQRVLGVPIIVQASQAEKNRAAAMANNLQKGSAGPMRLYVGSLHFNITEDMLRGIFEPFGRIESIQLMMDSETGRSKGYGFITFSDSECAKKALEQLNGFELAGRPMKVGHVTERTDASSASSFLDSDELERTGIDLGTTGRLQLMARLAEGTGLQIPPAAQQALQMSGSLAFGAVADLQTRLSQQTEALFVIMFWNEIWSDNMITLQL

SEQ ID NO: 30660 - protein, 393 aa, Artificial Sequence
  Synthetic polypeptide
SQHFGRLREPIDNLTPEERDARTVFCMQLAARIRPRDLEEFFSTVGKVRDVRMISDRNSRRSKGIAYVEFVDVSSVPLAIGLTGQRVLGVPIIVQASQAEKNRAAAMANNLQKGSAGPMRLYVGSLHFNITEDMLRGIFEPFGRIESIQLMMDSETGRSKGYGFITFSDSECAKKALEQLNGFELAGRPMKVGHVTERTDASSASSFLDSDELERTGIDLGTTGRLQLMARLAEGTGLQIPPAAQQALQMSGSLAFGAVADLQTRLSQQTEASALAAAASVQPLATQCFQLSNMFNPQTEEEVGWDTEIKDDVIEECNKHGGVIHIYVDKNSAQGNVYVKCPSIAAAIAAVNALHGRWFAGKMITAAYVPLPTYHNLFPDSMTATQLLVPSRR

SEQ ID NO: 30661 - protein, 399 aa, Artificial Sequence
  Synthetic polypeptide
SQHFGRLREPIDNLTPEERDARTVFCMQLAARIRPRDLEEFFSTVGKVRDVRMISDRNSRRSKGIAYVEFVDVSSVPLAIGLTGQRVLGVPIIVQASQAEKNRAAAMANNLQKGSAGPMRLYVGSLHFNITEDMLRGIFEPFGRIESIQLMMDSETGRSKGYGFITFSDSECAKKALEQLNGFELAGRPMKVGHVTERTDASSASSFLDSDELERTGIDLGTTGRLQLMARLAEGTGLQIPPAAQQALQMSGSLAFGAVAEFSFVIDLQTRLSQQTEASALAAAASVQPLATQCFQLSNMFNPQTEEEVGWDTEIKDDVIEECNKHGGVIHIYVDKNSAQGNVYVKCPSIAAAIAAVNALHGRWFAGKMITAAYVPLPTYHNLFPDSMTATQLLVPSRR

SEQ ID NO: 30662 - protein, 72 aa, Artificial Sequence
  Synthetic polypeptide
DTPELDSWFCHLPFVRSSTGPADLKHFDPEFTQEAVSKSIGCTPDTVASSSGASSAFLGFSYAPEDDDILDC

SEQ ID NO: 30663 - protein, 455 aa, Artificial Sequence
  Synthetic polypeptide
KKIKIISWAWWCTPLVPATWEAESGGSLEPRSSRLWTSLPAPMFSRSDFSVWTILKKCVGLELSKITMPIAFNEPLSFLQRITEYMEHVYLIHRASCQPQPLERMQSVAAFAVSAVASQWERTGKPFNPLLGETYELIREDLGFRFISEQVSHHPPISAFHSEGLNHDFLFHGSIYPKLKFWGKSVEAEPRGTITLELLKHNEAYTWTNPTCCVHNVIIGKLWIEQYGTVEILNHRTGHKCVLHFKPCGLFGKELHKVEGHIQDKNKKKLFMIYGKWTECLWGIDPVSYESFKKQERRGDHLRKAKLDEDSGKADSDVADDVPVAQETVQVIPGSKLLWRINTRPPNSAQMYNFTSFTVSLNELETGMEKTLPPTDCRLRPDIRGMENGNMDLASQEKERLEEKQREARRERAKEEAEWQTRWFYPGNNPYTGTPDWLYAGDYFERNFSDCPDIY

SEQ ID NO: 30664 - protein, 26 aa, Artificial Sequence
  Synthetic polypeptide
AGRGGSHLQSQHFGRPRRVDHLSPSD

SEQ ID NO: 30665 - protein, 13 aa, Artificial Sequence
  Synthetic polypeptide
KGDPGIDARVRDG

SEQ ID NO: 30666 - protein, 36 aa, Artificial Sequence
  Synthetic polypeptide
CRLWHQHPGPHPPLRFTDCGTRWAGHSASCSSLRKR

SEQ ID NO: 30667 - protein, 75 aa, Artificial Sequence
  Synthetic polypeptide
HLQSSLHCYCLRVILIFFPECYAKQKMRQAWKSWLIYVVVRRTKLQMQTTALEFRQRIILRVWWSTWRQRLGQVR

SEQ ID NO: 30668 - protein, 229 aa, Artificial Sequence
  Synthetic polypeptide
HLQSSLHCYCLRVILIFFPECYAKQKMRQAWKSWLIYVVVRRTKLQMQTTALEFRQRIILRVWWSTWRQRLGQVRVSRALHASALKHRALSLQVQAWSQWREQLLYVQKEKQKVVSAVKHHQHWQKRRFLKAWLEYLQVRRVKRQQNAATGQSGWSFPAESPACCLPHMEQTLAMAPPGKCPQCKSNTFPQGDIREASIFSLEAEDVSASRKPPGRENGHPSRRATASV

SEQ ID NO: 30669 - protein, 1051 aa, Artificial Sequence
  Synthetic polypeptide
HLQSSLHCYCLRVILIFFPECYAKQKMRQAWKSWLIYVVVRRTKLQMQTTALEFRQRIILRVWWSTWRQRLGQVRVSRALHASALKHRALSLQVQAWSQWREQLLYVQKEKQKVVSAVKHHQHWQKRRFLKAWLEYLQVRRVKRQQNEMAERFHHVTVLQIYFCDWQQAWERRESLYAHHAQVEKLARKMALRRAFTHWKHYMLLCAEEAAQFEMAEEHHRHSQLLLHRFWNLWRSQIEQKKERELLPLLHAAWDHYRIALLCKCIELWLQYTQKRRYKQLLQARADGHFQQRALPAAFHTWNRLWRWRHQENVLSARATRFHRETLEKQVFSLWRQKMFQHRENRLAERMAILHAERQLLYRSWFMWHQQAAARHQEQEWQTVACAHHRHGRLKKAFCLWRESAQGLRTERTGRVRAAEFHMAQLLRWAWSQWRECLALRGAERQKLMRADLHHQHSVLHRALQAWVTYQGRVRSILREVAARESQHNRQLLRGALRRWKENTMARVDEAKKTFQASTHYRRTICSKVLVQWREAVSVQMYYRQQEDCAIWEAQKVLDRGCLRTWFQRWWDCSRRSAQQRLQLERAVQHHHRQLLLEGLARWKTHHLQCVRKRLLHRQSTQLLAQRLSRTCFRQWRQQLAARRQEQRATVRALWFWAFSLQAKVWATWLAFVLERRRKKARLQWALQAYQGQLLQEGATRLLRFAASMKASRQQLQAQQQVQAAHSLHRAVRRCATLWKQKVLGRGGKPQPLAAIAPSRKVTFEGPLLNRIAAGAGDGTLETKRPQASRPLGALGRLAAEEPHALELNTAHSARKQPRRPHFLLEPAQSQRPQKPQEHGLGMAQPAAPSLTRPFLAEAPTALVPHSPLPGALSSAPGPKQPPTASTGPELLLLPLSSFMPCGAAAPARVSAQRATPRDKPPVPSSLASVPDPHLLLPGDFSATRAGPGLSTAGSLDLEAELEEIQQQLLHYQTTKQNLWSCRRQASSLRRWLELNREEPGPEDQEVEQQVQKELEQVEMQIQLLAEELQAQRQPIGACVARIQALRQALC

SEQ ID NO: 30670 - protein, 1082 aa, Artificial Sequence
  Synthetic polypeptide
HLQSSLHCYCLRVILIFFPECYAKQKMRQAWKSWLIYVVVRRTKLQMQTTALEFRQRIILRVWWSTWRQRLGQVRVSRALHASALKHRALSLQVQAWSQWREQLLYVQKEKQKVVSAVKHHQHWQKRRFLKAWLEYLQVRRVKRQQNEMAERFHHVTVLQIYFCDWQQAWERRESLYAHHAQVEKLARKMALRRAFTHWKHYMLLCAEEAAQFEMAEEHHRHSQLYFCFRALKDNVTHAHLQQIRRNLAHQQHGVTLLHRFWNLWRSQIEQKKERELLPLLHAAWDHYRIALLCKCIELWLQYTQKRRYKQLLQARADGHFQQRALPAAFHTWNRLWRWRHQENVLSARATRFHRETLEKQVFSLWRQKMFQHRENRLAERMAILHAERQLLYRSWFMWHQQAAARHQEQEWQTVACAHHRHGRLKKAFCLWRESAQGLRTERTGRVRAAEFHMAQLLRWAWSQWRECLALRGAERQKLMRADLHHQHSVLHRALQAWVTYQGRVRSILREVAARESQHNRQLLRGALRRWKENTMARVDEAKKTFQASTHYRRTICSKVLVQWREAVSVQMYYRQQEDCAIWEAQKVLDRGCLRTWFQRWWDCSRRSAQQRLQLERAVQHHHRQLLLEGLARWKTHHLQCVRKRLLHRQSTQLLAQRLSRTCFRQWRQQLAARRQEQRATVRALWFWAFSLQAKVWATWLAFVLERRRKKARLQWALQAYQGQLLQEGATRLLRFAASMKASRQQLQAQQQVQAAHSLHRAVRRCATLWKQKVLGRGGKPQPLAAIAPSRKVTFEGPLLNRIAAGAGDGTLETKRPQASRPLGALGRLAAEEPHALELNTAHSARKQPRRPHFLLEPAQSQRPQKPQEHGLGMAQPAAPSLTRPFLAEAPTALVPHSPLPGALSSAPGPKQPPTASTGPELLLLPLSSFMPCGAAAPARVSAQRATPRDKPPVPSSLASVPDPHLLLPGDFSATRAGPGLSTAGSLDLEAELEEIQQQLLHYQTTKQNLWSCRRQASSLRRWLELNREEPGPEDQEVEQQVQKELEQVEMQIQLLAEELQAQRQPIGACVARIQALRQALC

SEQ ID NO: 30671 - protein, 10 aa, Artificial Sequence
  Synthetic polypeptide
MTKLLSPIRM

SEQ ID NO: 30672 - protein, 28 aa, Artificial Sequence
  Synthetic polypeptide
GLLWSGMALTGSLRVTQRLWRSLTSSST

SEQ ID NO: 30673 - protein, 178 aa, Artificial Sequence
  Synthetic polypeptide
TPEVEATVPLQKRAVPSMRCETVFKLTPEFFSPGKSRGLDSQQCAQRQRWGYRRSLQESWAQNLLSPQHPCPGPPSGVHTHSEPIFCTTSISNTCLLPQNSSWKAWQVPWCLHDGQTRPALDMCQEMEQLLLHSQERLVSLEPVISVRSRPTSMTLTTSLPNLLSAERLQFCPQRAPA

SEQ ID NO: 30674 - protein, 24 aa, Artificial Sequence
  Synthetic polypeptide
ITEQAERKAGGIWKTGIPSATLIR

SEQ ID NO: 30675 - protein, 99 aa, Artificial Sequence
  Synthetic polypeptide
QNQPLFFPFFLSLLSRKTMRMKTFMMIHCHLMNNMSCRSRLATLNEKLTALERRIEYIEARVTKGETLRTVPCCCWEVALHNTGHMGKAPAAFSSFLSP

SEQ ID NO: 30676 - protein, 69 aa, Artificial Sequence
  Synthetic polypeptide
QNQPLFFPFFLSLLSRKTMRMKTFMMIHCHLMNNMSCRSRLATLNEKLTALERRIEYIEARVTKGETLT

SEQ ID NO: 30677 - protein, 14 aa, Artificial Sequence
  Synthetic polypeptide
TQEAELAGVATVRK

SEQ ID NO: 30678 - protein, 476 aa, Artificial Sequence
  Synthetic polypeptide
APPPVRSAAALDSNRSTNPIVSCACEGSTLCASYENLMPDELSLSPMTPRWDHLVAEKQAQCSTDSTLWYFMHGVCREGSQCLFSHDLANSKPSTICKYYQKGYCAYGTRCRYDHTRPSAAAGGAVGTMAHSVPSPAFHSPHPPSEVTASIVKTNSHEPGKREKRTLVLRDRNLSGMAERKTQPSMVSNPGSCSDPQPSPEMKPHSYLDAIRSGLDDVEASSSYSNEQQLCPYAAAGECRFGDACVYLHGEVCEICRLQVLHPFDPEQRKAHEKICMLTFEHEMEKAFAFQASQDKVCSICMEVILEKASASERRFGILSNCNHTYCLSCIRQWRCAKQFENPIIKSCPECRVISEFVIPSVYWVEDQNKKNELIEAFKQGMGKKACKYFEQGKGTCPFGSKCLYRHAYPDGRLAEPEKPRKQLSSQGTVRFFNSVRLWDFIENRESRHVPNNEDVDMTELGDLFMHLSGVESSEP

SEQ ID NO: 30679 - protein, 474 aa, Artificial Sequence
  Synthetic polypeptide
APPPVRSAAALDSNRSTNPIVSCACEGSTLCASYENLMPDELSLSPMTPRWDHLVAEKQAQCSTDSTLWYFMHGVCREGSQCLFSHDLANSKPSTICKYYQKGYCAYGTRYDHTRPSAAAGGAVGTMAHSVPSPAFHSPHPPSEVTASIVKTNSHEPGKREKRTLVLRDRNLSGMAERKTQPSMVSNPGSCSDPQPSPEMKPHSYLDAIRSGLDDVEASSSYSNEQQLCPYAAAGECRFGDACVYLHGEVCEICRLQVLHPFDPEQRKAHEKICMLTFEHEMEKAFAFQASQDKVCSICMEVILEKASASERRFGILSNCNHTYCLSCIRQWRCAKQFENPIIKSCPECRVISEFVIPSVYWVEDQNKKNELIEAFKQGMGKKACKYFEQGKGTCPFGSKCLYRHAYPDGRLAEPEKPRKQLSSQGTVRFFNSVRLWDFIENRESRHVPNNEDVDMTELGDLFMHLSGVESSEP

SEQ ID NO: 30680 - protein, 56 aa, Artificial Sequence
  Synthetic polypeptide
IPTLWEAEAGGLLQPRNLRLAWATWGEPVSAKNKKISQLQIWDTAGQERFRTITQS

SEQ ID NO: 30681 - protein, 86 aa, Artificial Sequence
  Synthetic polypeptide
IPTLWEAEAGGLLQPRNLRLAWATWGEPVSAKNKKISQLQIWDTAGQERFRTITQSYYRSANGAILAYDITKRSSFLSVPHWIEDV

SEQ ID NO: 30682 - protein, 125 aa, Artificial Sequence
  Synthetic polypeptide
IPTLWEAEAGGLLQPRNLRLAWATWGEPVSAKNKKISQLQIWDTAGQERFRTITQSYYRSANGAILAYDITKRSSFLSVPHWIEDVRKYAGSNIVQLLIEMQSCYVAQADLELLASSNPPASTSK

SEQ ID NO: 30683 - protein, 182 aa, Artificial Sequence
  Synthetic polypeptide
IPTLWEAEAGGLLQPRNLRLAWATWGEPVSAKNKKISQLQIWDTAGQERFRTITQSYYRSANGAILAYDITKRSSFLSVPHWIEDVRKYAGSNIVQLLIGNKSDLSELREVSLAEAQSLAEHYDILCAIETSAKDSSNVEEAFLRVATELIMRHGGPLFSEKSPDHIQLNSKDIGEGWGCGC

SEQ ID NO: 30684 - protein, 22 aa, Artificial Sequence
  Synthetic polypeptide
MAGLVFQWLRTPPTCSSLALML

SEQ ID NO: 30685 - protein, 26 aa, Artificial Sequence
  Synthetic polypeptide
MLPPFVLAVTMGLSVVKVAKVSSKGV

SEQ ID NO: 30686 - protein, 153 aa, Artificial Sequence; identical to SEQ ID NO: 21474
  Synthetic polypeptide

SEQ ID NO: 30687 - protein, 33 aa, Artificial Sequence
  Synthetic polypeptide
PEDKSVSTLSSRDRATRGLLGLAGMRPELRRKD

SEQ ID NO: 30688 - protein, 28 aa, Artificial Sequence
  Synthetic polypeptide
MASASPTIKRPRKSRATSSLSYIQVQQL

SEQ ID NO: 30689 - protein, 80 aa, Artificial Sequence
  Synthetic polypeptide
ILKGARTLFVNCAFEGSGLRAAYENLMPDDLSLSPIPPDGTVYLQENKLKTVTDSTLWIASSPGGLSPADCGASFRCHRL

SEQ ID NO: 30690 - protein, 131 aa, Artificial Sequence; identical to SEQ ID NO: 23151
  Synthetic polypeptide

SEQ ID NO: 30691 - protein, 138 aa, Artificial Sequence
  Synthetic polypeptide
AEIAPLHSSLGDKESQQSNFGTGEQKRYNPSKTSNGHQSKSMLKDDLKLSSSEDSDGEQDCDKTMPRSTPGSNSEPSHHNSEGADNSRDDSSSHSGSESSSGSDSESESSSSDSEANEPSQSASPEPEPPPTNKWQLD

SEQ ID NO: 30692 - protein, 826 aa, Artificial Sequence
  Synthetic polypeptide
AEIAPLHSSLGDKESQQSNFGTGEQKRYNPSKTSNGHQSKSMLKDDLKLSSSEDSDGEQDCDKTMPRSTPGSNSEPSHHNSEGADNSRDDSSSHSGSESSSGSDSESESSSSDSEANEPSQSASPEPEPPPTNKWQLDNWLNKVNPHKVSPASSVDSNIPSSQGYKKEGREQGTGNSYTDTSGPKETSSATPGRDSKTIQKGSESGRGRQKSPAQSDSTTQRRTVGKKQPKKAEKAAAEEPRGGLKIESETPVDLASSMPSSRHKAATKGSRKPNIKKESKSSPRPTAEKKKYKSTSKSSQKSREIIETDTSSSDSDESESLPPSSQTPKYPESNRTPVKPSSVEEEDSFFRQRMFSPMEEKELLSPLSEPDDRYPLIVKIDLNLLTRIPGKPYKETEPPKGEKKNVPEKHTREAQKQASEKVSNKGKRKHKNEDDNRASESKKPKTEDKNSAGHKPSSNRESSKQSAAKEKDLLPSPAGPVPSKDPKTEHGSRKRTISQSSSLKSSSNSNKETSGSSKNSSSTSKQKKTEGKTSSSSKEVKEKAPSSSSNCPPSAPTLDSSKPRRTKLVFDDRNYSADHYLQEAKKLKHNADALSDRFEKAVYYLDAVVSFIECGNALEKNAQESKSPFPMYSETVDLIKYTMKLKNYLAPDATAADKRLTVLCLRCESLLYLRLFKLKKENALKYSKTLTEHLKNSYNNSQAPSPGLGSKAVGMPSPVSPKLSPGNSGNYSSGASSASASGSSVTIPQKIHQMAASYVQVTSNFLYATEIWDQAEQLSKEQKEFFAELDKVMGPLIFNASIMTDLVRYTRQGLHWLRQDAKLIS

SEQ ID NO: 30693 - protein, 563 aa, Artificial Sequence
  Synthetic polypeptide
AEIAPLHSSLGDKESQQSNFGTGEQKRYNPSKTSNGHQSKSMLKDDLKLSSSEDSDGEQDCDKTMPRSTPGSNSEPSHHNSEGADNSRDDSSSHSGSESSSGSDSESESSSSDSEANEPSQSASPEPEPPPTNKWQLDNWLNKVNPHKVSPASSVDSNIPSSQGYKKEGREQGTGNSYTDTSGPKETSSATPGRDSKTIQKGSESGRGRQKSPAQSDSTTQRRTVGKKQPKKAEKAAAEEPRGGLKIESETPVDLASSMPSSRHKAATKGSRKPNIKKESKSSPRPTAEKKKYKSTSKSSQKSREIIETDTSSSDSDESESLPPSSQTPKYPESNRTPVKPSSVEEEDSFFRQRMFSPMEEKELLSPLSEPDDRYPLIVKIDLNLLTRIPGKPYKETEPPKGEKKNVPEKHTREAQKQASEKVSNKGKRKHKNEDDNRASESKKPKTEDKNSAGHKPSSNRESSKQSAAKEKDLLPSPAGPVPSKDPKTEHGSRKRTISQSSSLKSSSNSNKETSGSSKNSSSTSKQKKTEGKTSSSSKEVKVKCWGPGAFENHSTCHVTFPG

SEQ ID NO: 30694 - protein, 36 aa, Artificial Sequence
  Synthetic polypeptide
SVTVSHNPQLGPSGCRKTSSGLPLILHYDHSSRYKT

SEQ ID NO: 30695 - protein, 21 aa, Artificial Sequence
  Synthetic polypeptide
SEGIRIMEMLLKEQCGAPLAE

SEQ ID NO: 30696 - protein, 989 aa, Artificial Sequence; identical to SEQ ID NO: 23291
  Synthetic polypeptide

SEQ ID NO: 30697 - protein, 20 aa, Artificial Sequence
  Synthetic polypeptide
SRTMSSLRVSTSHVGPWVSP

SEQ ID NO: 30698 - protein, 119 aa, Artificial Sequence; identical to SEQ ID NO: 23538
  Synthetic polypeptide

SEQ ID NO: 30699 - protein, 164 aa, Artificial Sequence; identical to SEQ ID NO: 23539
  Synthetic polypeptide

SEQ ID NO: 30700 - protein, 60 aa, Artificial Sequence; identical to SEQ ID NO: 23593
  Synthetic polypeptide

SEQ ID NO: 30701 - protein, 45 aa, Artificial Sequence
  Synthetic polypeptide
GAKPSKGNWQTNRFKTIKDNSSNIKKAQHMMKKEQTDVMHQNIYD

SEQ ID NO: 30702 - protein, 603 aa, Artificial Sequence
  Synthetic polypeptide
GAKPSKGNWQTNRFKTIKDNSSNIKKAQHMMKKEQTDVMHQNIYDYIHVDDRQDFCRQLHWAMDPPQVVFGQPPPLETGDDAILGRLLRAQEWGTGTPTEYSAFLTRCFICRVRCLLDSTSGFLARGSQAWQLRLCCPEPLMTMQFQGKLKFLFGQKKKAPSGAMLPPRLSLFCIAAPVLLPSAAEMKMRSALLRAKPRADTAATADAKVKATTSLCESELHGKPNYSAGRSSRESGVLVLREQTDAGRWAQVPARAPCLCLRGGPDLVLDPKGGSGDREEEQHRMLSRASGVTGRRETPGPTKPLPWTAGKHSEDGARPRLQPSKNDPPSLRPMPRGSCLPCPCVQGTFRNSPISHPPSPSPSAYSSRTSRPMRDVGEDQVHPPLCHFPQRSLQHQLPQPGAQRFATRGYPMEDMKLQGVPMPPGDLCGPTLLLDVSIKMEKDSGCEGAADGCVPSQVWLGASDRSHPATFPTRMHLKTEPDSRQQVYISHLGHGVRGAQPHGRATAGRSRELTPFHPAHCACLEPTDGLPQSEPPHQLCARGRGEQSCTCRAAEAAPVVKREPLDSPQWATHSQGMVPGMLPKSALATLVPPQASGCTFLP

SEQ ID NO: 30703 - protein, 585 aa, Artificial Sequence
  Synthetic polypeptide
GAKPSKGNWQTNRFKTIKDNSSNIKKAQHMMKKEQTDVMHQNIYDYIHVDDRQDFCRQLHWAMDPPQVVFGQPPPLETGDDAILGRLLRAQEWGTGTPTEYSAFLTRCFICRVRCLLDSTSGFLTMQFQGKLKFLFGQKKKAPSGAMLPPRLSLFCIAAPVLLPSAAEMKMRSALLRAKPRADTAATADAKVKATTSLCESELHGKPNYSAGRSSRESGVLVLREQTDAGRWAQVPARAPCLCLRGGPDLVLDPKGGSGDREEEQHRMLSRASGVTGRRETPGPTKPLPWTAGKHSEDGARPRLQPSKNDPPSLRPMPRGSCLPCPCVQGTFRNSPISHPPSPSPSAYSSRTSRPMRDVGEDQVHPPLCHFPQRSLQHQLPQPGAQRFATRGYPMEDMKLQGVPMPPGDLCGPTLLLDVSIKMEKDSGCEGAADGCVPSQVWLGASDRSHPATFPTRMHLKTEPDSRQQVYISHLGHGVRGAQPHGRATAGRSRELTPFHPAHCACLEPTDGLPQSEPPHQLCARGRGEQSCTCRAAEAAPVVKREPLDSPQWATHSQGMVPGMLPKSALATLVPPQASGCTFLP

SEQ ID NO: 30704 - protein, 13 aa, Artificial Sequence
  Synthetic polypeptide
MMAHLCIFGLQSR

SEQ ID NO: 30705 - protein, 538 aa, Artificial Sequence
  Synthetic polypeptide
GRRIASTQEADVVVARTWHKLIKTRQEQGAENEELHQLWRKLTQFLAESTEDQNNETQQLLFTAFENALGLSDKIPSEDHQVLYRHFIQSLSKFPHESARLKKACEGMINIYPTVQYPLEVLCLHLIESGNLTDEGQQYCCRLVEMDSKSGPGLIGLGIKALQDKKYEDAVRNLTEGLKESPVCTSGWYHLAEAQVKMHRPKEAVLSCSQALKIVDNLGASGNSLYQRNLCLHLKAEALIKLSDYDSSEEAIRTLDQISDADNIPGLLVLKSLAYRNKGSFDEAAKIMEDLLSSYPDLAEVHALEALIHFTKKDYLQAEKCFQRALEKDTEVAEYHYQLGLTYWFMGEETRKDKTKALTHFLKAARLDTYMGKVFCYLGHYYRDVVGDKNRARGCYRKAFELDDTDAESGAAAVDLSVELEDMEMALAILTTVTQKASAGTAKWAWLRRGLYYLKAGQHSQAVADLQAALRADPKDFNCWESLGEAYLSRGGYTTALKSFTKASELNPESIYSVFKVAAIQQILGKYKEAVAQYQMII

SEQ ID NO: 30706 - protein, 1443 aa, Artificial Sequence
  Synthetic polypeptide
GRRIASTQEADVVVARTWHKLIKTRQEQGAENEELHQLWRKLTQFLAESTEDQNNETQQLLFTAFENALGLSDKIPSEDHQVLYRHFIQSLSKFPHESARLKKACEGMINIYPTVQYPLEVLCLHLIESGNLTDEGQQYCCRLVEMDSKSGPGLIGLGIKALQDKKYEDAVRNLTEGLKESPVCTSGWYHLAEAQVKMHRPKEAVLSCSQALKIVDNLGASGNSLYQRNLCLHLKAEALIKLSDYDSSEEAIRTLDQISDADNIPGLLVLKSLAYRNKGSFDEAAKIMEDLLSSYPDLAEVHALEALIHFTKKDYLQAEKCFQRALEKDTEVAEYHYQLGLTYWFMGEETRKDKTKALTHFLKAARLDTYMGKVFCYLGHYYRDVVGDKNRARGCYRKAFELDDTDAESGAAAVDLSVELEDMEMALAILTTVTQKASAGTAKWAWLRRGLYYLKAGQHSQAVADLQAALRADPKDFNCWESLGEAYLSRGGYTTALKSFTKASELNPESIYSVFKVAAIQQILGKYKEAVAQYQMIIKKKEDYVPALKGLGECHLMMAKAALVDYLDGKAVDYIEKALEYFTCALQHRADVSCLWKLAGDACTCLYAVAPSKVNVHVLGVLLGQKEGKQVLKKNELLHLGGRCYGRALKLMSTSNTWCDLGINYYRQAQHLAETGSNMNDLKELLEKSLHCLKKAVRLDSNNHLYWNALGVVACYSGIGNYALAQHCFIKSIQSEQINAVAWTNLGVLYLTNENIEQAHEAFKMAQSLDPSYLMCWIGQALIAEAVGSYDTMDLFRHTTELNMHTEGALGYAYWVCTTLQDKSNRETELYQYNILQMNAIPAAQVILNKYVERIQNYAPAFTMLGYLNEHLQLKKEAANAYQRAILLLQTAEDQDTYNVAIRNYGRLLCSTGEYDKAIQAFKSTPLEVLEDIIGFALALFMKGLYKESSKAYERALSIVESEQDKAHILTALAITEYKQGKTDVAKTLLFKCSILKEPTTESLQALCALGLAMQDATLSKAALNELLKHIKHKDSNYQRCLLTSAIYALQGRSVAVQKQISKAVHSNPGDPALWSLLSRVVAQYAQRNAKGGVVAGNVAHILDSNHGKKALLYTAVNQLAMGSSSAEDEKNTALKTIQKAALLSPGDPAIWAGLMAACHADDKLALVNNTQPKRIDLYLALLSAVSASIKDEKFFENYNQSLEKWSLSQAVTGLIDTGRISEAETLCTKNLKSNPDQPAVILLLRQVQCKPLLESQKPLPDAVLEELQKTVMSNSTSVPAWQWLAHVYQSQGMMRAAEMCYRKSLQLASQRGSWSGKLSSLLRLALLALKVCMANISNDHWPSLVQEATTEALKLCFCPLAVLLQALLQFKRKMGARETRRLLERVVYQPGYPKSIASTARWYLLRHLYAKDDYELIDVLVNNAKTHGDTRALELNQRLSSQ

SEQ ID NO: 30707 - protein, 97 aa, Artificial Sequence
  Synthetic polypeptide
GRSQDGRIGTAPVYSSQRERRRRRVISAFPSELQSQCTKTESDEVDKDGAGAGGSLYPECCPLSCDTTGELTDGTAHTGLLCGLLPLHLSQLCQQQH

SEQ ID NO: 30708 - protein, 619 aa, Artificial Sequence
  Synthetic polypeptide
GWAWWLMPVIPALWEAEAGRSRGREIETILANPENKQDVRILRGSQRARRKRRGDSAVLKQGLPPKGKKAWCWASYLEEEKAVAVPAKLFKEHQSFPYNKNGFKVGMKLEGVDPEHQSVYCVLTVAEVCGYRIKLHFDGYSDCYDFWVNADALDIHPVGWCEKTGHKLHPPKGYKEEEFNWQTYLKTCKAQAAPKSLFENQNITVIPSGFRVGMKLEAVDKKNPSFICVATVTDMVDNRFLVHFDNWDESYDYWCEASSPHIHPVGWCKEHRRTLITPPGYPNVKHFSWDKYLEETNSLPAPARAFKVKPPHGFQKKMKLEVVDKRNPMFIRVATVADTDDHRVKVHFDGWNNCYDYWIDADSPDIHPVGWCSKTGHPLQPPLSPLELMEASEHGGCSTPGCKGIGHFKRARHLGPHSAANCPYSEINLNKDRIFPDRLSGEMPPASPSFPRNKRTDANESSSSPEIRDQHADDVKEDFEERTESEMRTSHEARGAREEPTVQQAQRRSAVFLSFKSPIPCLPLRWEQQSKLLPTVAGIPASKVSKWSTDEVSEFIQSLPGCEEHGKVFKDEQIDGEAFLLMTQTDIVKIMSIKLGPALKIFNSILMFKAAEKNSHNEL

SEQ ID NO: 30709 - protein, 1377 aa, Artificial Sequence
  Synthetic polypeptide
MILESTYHNTLHIAMKAPELKEKLEESEKLIKELTVTWEEKLRKTEEIAQERQRQLESMGISLEMSGIKVGDDKCYLVNLNADPALNELLVYYLKDHTRVGADTSQDIQLFGIGIQPQHCEIDIASDGDVTLTPKENARSCVNGTLVCSTTQLWHGDRILWGNNHFFRINLPKRKRRDWLKDFEKETGPPEHDLDAASEASSEPDYNYEFAQMEVIMKTLNSNDPVQNVVQVLEKQYLEEKRSALEEQRLMYERELEQLRQQLSPDRQPQSSGPDRLAYSSQTAQQKVTQWAEERDELFRQSLAKLREQLVKANTLVREANFLAEEMSKLTDYQVTLQIPAANLSANRKRGAIVSEPAIQVRRKGKSTQVWTIEKLENKLIDMRDLYQEWKEKVPEAKRLYGKRGDPFYEAQENHNLIGVANVFLECLFCDVKLQYAVPIISQQGEVAGRLHVEVMRVTGAVPERVVEDDSSENSSESGSLEVVDSSGEIIHRVKKLTCRVKIKEATGLPLNLSNFVFCQYTFWDQCESTVAAPVVDPEVPSPQSKDAQYTVTFSHCKDYVVNVTEEFLEFISDGALAIEVWGHRCAGNGSSIWEVDSLHAKTRTLHDRWNEVTRRIEMWISILELNELGEYAAVELHQAKDVNTGGIFQLRQGHSRRVQVTVKPVQHSGTLPLMVEAILSVSIGCVTARSTKLQRGLDSYQEEDLNCVRERWSDALIKRREYLDEQIKKVSNKTEKTEDDVEREAQLVEQWVGLTEERNAVLVPAPGSGIPGAPADWIPPPGMETHIPVLFLDLNADDLSANEQLVGPHASGVNSILPKEHGSQFFYLPIIKHSDDEVSATASWDSSVHDSVHLNRVTPQNERIYLIVKTTVQLSHPAAMELVLRKRIAANIYNKQSFTQSLKRRISLKNIFYSCGVTYEIVSNIPKATEEIEDRETLALLAARSENEGTSDGETYIEKYTRGVLQVENILSLERLRQAVTVKEALSTKARHIRRSLSTPNVHNVSSSRPDLSGFDEDDKGWPENQLDMSDYSSSYQDVACYGTLPRDSPRRNKEGCTSETPHALTVSPFKAFSPQPPKFFKPLMPVKEEHKKRIALEARPLLSQEDSEEEENELEAINRKLISSQPYVPVEFADFSVYNASLENREWFSSKVDLSNSRVLEKEVSRSPTTSSITSGYFSHSASNATLSDMVVPSSDSSDQLAIQTKDADSTEHSTPSLVHDFRPSSNKELTEVEKGLVKDKIIVVPLKENSALAKGSPSSQSIPEKNSKSLCRTGSCSELDACPSKISQPARGFCPREVTVEHTTNILEDHSFTEFMGVSEGKDFDGLTDSSAGELSSRRSLPNKTGGKTVSDGLHHPSQLHSKLENDQGGTTSR

SEQ ID NO: 30710 - protein, 1385 aa, Artificial Sequence
  Synthetic polypeptide
MILESTYHNTLHIAMKAPELKEKLEESEKLIKELTVTWEEKLRKTEEIAQERQRQLESMGISLEMSGIKVGDDKCYLVNLNADPALNELLVYYLKDHTRVGADTSQDIQLFGIGIQPQHCEIDIASDGDVTLTPKENARSCVNGTLVCSTTQLWHGDRILWGNNHFFRINLPKRKRRDWLKDFEKETGPPEHDLDAASEASSEPDYNYEFAQMEVIMKTLNSNDPVQNVVQVLEKQYLEEKRSALEEQRLMYERELEQLRQQLSPDRQPQSSGPDRLAYSSQTAQQKVTQWAEERDELFRQSLAKLREQLVKANTLVREANFLAEEMSKLTDYQVTLQIPAANLSANRKRGAIVSEPAIQVRRKGKSTQVWTIEKLENKLIDMRDLYQEWKEKVPEAKRLYGKRGDPFYEAQENHNLIGVANVFLECLFCDVKLQYAVPIISQQGEVAGRLHVEVMRVTGAVPERVVEDDSSENSSESGSLEVVDSSGEIIHRVKKLTCRVKIKEATGLPLNLSNFVFCQYTFWDQCESTVAAPVVDPEVPSPQSKDAQYTVTFSHCKDYVVNVTEEFLEFISDGALAIEVWGHRCAGNGSSIWEVDSLHAKTRTLHDRWNEVTRRIEMWISILELNELGEYAAVELHQAKDVNTGGIFQLRQGHSRRVQVTVKPVQHSGTLPLMVEAILSVSIGCVTARSTKLQRGLDSYQEEDLNCVRERWSDALIKRREYLDEQIKKVSNKTEKTEDDVEREAQLVEQWVGLTEERNAVLVPAPGSGIPGAPADWIPPPGMETHIPVLFLDLNADDLSANEQLVGPHASGVNSILPKEHGSQFFYLPIIKHSDDEVSATASWDSSVHDSVHLNRVTPQNERIYLIVKTTVQLSHPAAMELVLRKRIAANIYNKQSFTQSLKRRISLKNIFYSCGVTYEIVSNIPKATEEIEDRETLALLAARSENEGTSDGETYIEKYTRGVLQVENILSLERLRQAVTVKEALSTKARHIRRSLSTPNVHNVSSSRPDLSGFDEDDKGWPENQLDMSDYSSSYQDVACYGTLPRDSPRRNKEGCTSETPHALTVSPFKAFSPQPPKFFKPLMPVKEEHKKRIALEARPLLSQEDSEEEENELEAINRKLISSQPYVPVEFADFSVYNASLENREWFSSKVDLSNSRVLEKEVSRSPTTSSITSGYFSHSASNATLSDMVVPSSDSSDQLAIQTKDADSTEHSTPSLVHDFRPSSNKELTEVEKGLVKDKIIVVPLKENSALAKGSPSSQSIPEKNSKSLCRTGSCSELDACPSKISQPARGFCPREVTVEHTTNILEDHSFTEFMGVSEGKDFDGLTDSSAGELSSRRSLPNKTGGKTVSDGLHHPSQLHSKLENDQVIIPEAAFWVLCCQ

SEQ ID NO: 30711 - protein, 1398 aa, Artificial Sequence
  Synthetic polypeptide
MILESTYHNTLHIAMKAPELKEKLEESEKLIKELTVTWEEKLRKTEEIAQERQRQLESMGISLEMSGIKVGDDKCYLVNLNADPALNELLVYYLKDHTRVGADTSQDIQLFGIGIQPQHCEIDIASDGDVTLTPKENARSCVNGTLVCSTTQLWHGDRILWGNNHFFRINLPKRKRRDWLKDFEKETGPPEHDLDAASEASSEPDYNYEFAQMEVIMKTLNSNDPVQNVVQVLEKQYLEEKRSALEEQRLMYERELEQLRQQLSPDRQPQSSGPDRLAYSSQTAQQKVTQWAEERDELFRQSLAKLREQLVKANTLVREANFLAEEMSKLTDYQVTLQIPAANLSANRKRGAIVSEPAIQVRRKGKSTQVWTIEKLENKLIDMRDLYQEWKEKVPEAKRLYGKRGDPFYEAQENHNLIGVANVFLECLFCDVKLQYAVPIISQQGEVAGRLHVEVMRVTGAVPERVVEDDSSENSSESGSLEVVDSSGEIIHRVKKLTCRVKIKEATGLPLNLSNFVFCQYTFWDQCESTVAAPVVDPEVPSPQSKDAQYTVTFSHCKDYVVNVTEEFLEFISDGALAIEVWGHRCAGNGSSIWEVDSLHAKTRTLHDRWNEVTRRIEMWISILELNELGEYAAVELHQAKDVNTGGIFQLRQGHSRRVQVTVKPVQHSGTLPLMVEAILSVSIGCVTARSTKLQRGLDSYQRDDEDGDDMDSYQEEDLNCVRERWSDALIKRREYLDEQIKKVSNKTEKTEDDVEREAQLVEQWVGLTEERNAVLVPAPGSGIPGAPADWIPPPGMETHIPVLFLDLNADDLSANEQLVGPHASGVNSILPKEHGSQFFYLPIIKHSDDEVSATASWDSSVHDSVHLNRVTPQNERIYLIVKTTVQLSHPAAMELVLRKRIAANIYNKQSFTQSLKRRISLKNIFYSCGVTYEIVSNIPKATEEIEDRETLALLAARSENEGTSDGETYIEKYTRGVLQVENILSLERLRQAVTVKEALSTKARHIRRSLSTPNVHNVSSSRPDLSGFDEDDKGWPENQLDMSDYSSSYQDVACYGTLPRDSPRRNKEGCTSETPHALTVSPFKAFSPQPPKFFKPLMPVKEEHKKRIALEARPLLSQEDSEEEENELEAINRKLISSQPYVPVEFADFSVYNASLENREWFSSKVDLSNSRVLEKEVSRSPTTSSITSGYFSHSASNATLSDMVVPSSDSSDQLAIQTKDADSTEHSTPSLVHDFRPSSNKELTEVEKGLVKDKIIVVPLKENSALAKGSPSSQSIPEKNSKSLCRTGSCSELDACPSKISQPARGFCPREVTVEHTTNILEDHSFTEFMGVSEGKDFDGLTDSSAGELSSRRSLPNKTGGKTVSDGLHHPSQLHSKLENDQVIIPEAAFWVLCCQ

SEQ ID NO: 30712 - protein, 1433 aa, Artificial Sequence
  Synthetic polypeptide
MILESTYHNTLHIAMKAPELKEKLEESEKLIKELTVTWEEKLRKTEEIAQERQRQLESMGISLEMSGIKVGDDKCYLVNLNADPALNELLVYYLKDHTRVGADTSQDIQLFGIGIQPQHCEIDIASDGDVTLTPKENARSCVNGTLVCSTTQLWHGDRILWGNNHFFRINLPKRKRRDWLKDFEKETGPPEHDLDAASEASSEPDYNYEFAQMEVIMKTLNSNDPVQNVVQVLEKQYLEEKRSALEEQRLMYERELEQLRQQLSPDRQPQSSGPDRLAYSSQTAQQKVTQWAEERDELFRQSLAKLREQLVKANTLVREANFLAEEMSKLTDYQVTLQIPAANLSANRKRGAIVSEPAIQVRRKGKSTQVWTIEKLENKLIDMRDLYQEWKEKVPEAKRLYGKRGDPFYEAQENHNLIGVANVFLECLFCDVKLQYAVPIISQQGEVAGRLHVEVMRVTGAVPERVVEDDSSENSSESGSLEVVDSSGEIIHRVKKLTCRVKIKEATGLPLNLSNFVFCQYTFWDQCESTVAAPVVDPEVPSPQSKDAQYTVTFSHCKDYVVNVTEEFLEFISDGALAIEVWGHRCAGNGSSIWEVDSLHAKTRTLHDRWNEVTRRIEMWISILELNELGEYAAVELHQAKDVNTGGIFQLRQGHSRRVQVTVKPVQHSGTLPLMVEAILSVSIGCVTARSTKLQRGLDSYQRDDEDGDDMDSYQEEDLNCVRERWSDALIKRREYLDEQIKKVSNKTEKTEDDVEREAQLVEQWVGLTEERNAVLVPAPGSGIPGAPADWIPPPGMETHIPVLFLDLNADDLSANEQLVGPHASGVNSILPKEHGSQFFYLPIIKHSDDEVSATASWDSSVHDSVHLNRVTPQNERIYLIVKTTVQLSHPAAMELVLRKRIAANIYNKQSFTQSLKRRISLKNIFYSCGVTYEIVSNIPKATEEIEDRETLALLAARSENEGTSDGETYIEKYTRGVLQVENILSLERLRQAVTVKEALSTKARHIRRSLSTPNVHNVSSSRPDLSGFDEDDKGWPENQLDMSDYSSSYQDVACYGTLPRDSPRRNKEGCTSETPHALTVSPFKAFSPQPPKFFKPLMPVKEEHKKRIALEARPLLSQESMPPPQAHNPGCIVPSGSNGSSMPVEHNSKREKKIDSEEEENELEAINRKLISSQPYVPVEFADFSVYNASLENREWFSSKVDLSNSRVLEKEVSRSPTTSSITSGYFSHSASNATLSDMVVPSSDSSDQLAIQTKDADSTEHSTPSLVHDFRPSSNKELTEVEKGLVKDKIIVVPLKENSALAKGSPSSQSIPEKNSKSLCRTGSCSELDACPSKISQPARGFCPREVTVEHTTNILEDHSFTEFMGVSEGKDFDGLTDSSAGELSSRRSLPNKTGGKTVSDGLHHPSQLHSKLENDQVIIPEAAFWVLCCQ

SEQ ID NO: 30713 - protein, 548 aa, Artificial Sequence
  Synthetic polypeptide
PGAVAHACNPSTLGGRGRRITSVVMVDEAHERTLHTDILFGLIKDVARFRPELKVLVASATMDTARFSTFFDDAPVFRIPGRRFPVDIFYTKAPEADYLEACVVSVLQIHVTQPPGDILVFLTGQEEIEAACEMLQDRCRRLGSKIRELLVLPIYANLPSDMQARIFQPTPPGARKVVVATNIAETSLTIEGIIYVLDPGFCKQKSYNPRTGMESLTVTPCSKASANQRAGRAGRVAAGKCFRLYTAWAYQHELEETTVPEIQRTSLGNVVLLLKSLGIHDLMHFDFLDPPPYETLLLALEQLYALGALNHLGELTTSGRKMAELPVDPMLSKMILASEKYSCSEEILTVAAMLSVNNSIFYRPKDKVVHADNARVNFFLPGGDHLVLLNVYTQWAESGYSSQWCYENFVQFRSMRRARDVREQLEGLLERVEVGLSSCQGDYIRVRKAITAGYFYHTARLTRSGYRTVKQQQTVFIHPNSSLFEQQPRWLLYHELVLTTKEFMRQVLEIESSWLLEVAPHYYKAKELEDPHAKKMPKKIGKTREELG

SEQ ID NO: 30714 - protein, 24 aa, Artificial Sequence
  Synthetic polypeptide
FPSGILCVIMPGRSISLSSPYWLD

SEQ ID NO: 30715 - protein, 38 aa, Artificial Sequence; identical to SEQ ID NO: 25198
  Synthetic polypeptide

SEQ ID NO: 30716 - protein, 21 aa, Artificial Sequence
  Synthetic polypeptide
SQRCLTTLFGSFRKRQQEKTV

SEQ ID NO: 30717 - protein, 101 aa, Artificial Sequence
  Synthetic polypeptide
SQRCLTTLFGSFRKRQQEKTVNFIKDTCNILCQNDNFVMLASRKFKFRKMHYDRFVIFLMPHIGCIVMALSKYLMMFQIYCKVCIPALKKNISMLNTIFTY

SEQ ID NO: 30718 - protein, 82 aa, Artificial Sequence
  Synthetic polypeptide
VRWLTSVILSFREAENEVQTAKEFIKIVEAAENEYQTAISENYQTMSDTTFKALRRQLPVTRTKIDWNKILSYKIGKEMQNA

SEQ ID NO: 30719 - protein, 234 aa, Artificial Sequence
  Synthetic polypeptide
TLLPGTLRAEIVSDYGKDPSITSILDALDIFLLPVTNPDGYVFSQTKNRMWRKTRSKVSGSLCVGVDPNRNWDAGFGGPGASSNPCSDSYHGPSANSEVEVKSIVDFIKSHGKVKAFITLHSYSQLLMFPYGYKCTKLDDFDELSEVAQKAAQSLRSLHGTKYKVGPICSVIYQASGGSIDWSYDYGIKYSFAFELRDTGRYGFLLPARQILPTAEETWLGLKAIMEHVRDHPY

SEQ ID NO: 30720 - protein, 71 aa, Artificial Sequence
  Synthetic polypeptide
AGGSLEAGGKAGKDSGKAKAKAVSRSQRAGLQFPVGRIHRHLKTRTTSHGRVGATAAVYSAAILEYLTAEV

SEQ ID NO: 30721 - protein, 119 aa, Artificial Sequence
  Synthetic polypeptide
AGGSLEAGGKAGKDSGKAKAKAVSRSQRAGLQFPVGRIHRHLKTRTTSHGRVGATAAVYSAAILEYLTAEVLELAGNASKDLKVKRITPRHLQLAIRGDEELDSLIKATIAGGEKRRCS

SEQ ID NO: 30722 - protein, 127 aa, Artificial Sequence
  Synthetic polypeptide
AGGSLEAGGKAGKDSGKAKAKAVSRSQRAGLQFPVGRIHRHLKTRTTSHGRVGATAAVYSAAILEYLTAEVLELAGNASKDLKVKRITPRHLQLAIRGDEELDSLIKATIAGGGMYYYLSLDSYWSF

SEQ ID NO: 30723 - protein, 133 aa, Artificial Sequence
  Synthetic polypeptide
AGGSLEAGGKAGKDSGKAKAKAVSRSQRAGLQFPVGRIHRHLKTRTTSHGRVGATAAVYSAAILEYLTAEVLELAGNASKDLKVKRITPRHLQLAIRGDEELDSLIKATIAGGGVIPHIHKSLIGKKGQQKTA

SEQ ID NO: 30724 - protein, 81 aa, Artificial Sequence
  Synthetic polypeptide
AGGSLEAGGKAGKDSGKAKAKAVSRSQRAGLQVLELAGNASKDLKVKRITPRHLQLAIRGDEELDSLIKATIAGGEKRRCS

SEQ ID NO: 30725 - protein, 95 aa, Artificial Sequence
  Synthetic polypeptide
AGGSLEAGGKAGKDSGKAKAKAVSRSQRAGLQVLELAGNASKDLKVKRITPRHLQLAIRGDEELDSLIKATIAGGGVIPHIHKSLIGKKGQQKTA

SEQ ID NO: 30726 - protein, 119 aa, Artificial Sequence; identical to SEQ ID NO: 25860
  Synthetic polypeptide

SEQ ID NO: 30727 - protein, 261 aa, Artificial Sequence; identical to SEQ ID NO: 25854
  Synthetic polypeptide

SEQ ID NO: 30728 - protein, 30 aa, Artificial Sequence; identical to SEQ ID NO: 26043
  Synthetic polypeptide

SEQ ID NO: 30729 - protein, 275 aa, Artificial Sequence; identical to SEQ ID NO: 26034
  Synthetic polypeptide

SEQ ID NO: 30730 - protein, 316 aa, Artificial Sequence; identical to SEQ ID NO: 26042
  Synthetic polypeptide

SEQ ID NO: 30731 - protein, 312 aa, Artificial Sequence; identical to SEQ ID NO: 26041
  Synthetic polypeptide

SEQ ID NO: 30732 - protein, 69 aa, Artificial Sequence; identical to SEQ ID NO: 26123
  Synthetic polypeptide

SEQ ID NO: 30733 - protein, 39 aa, Artificial Sequence; identical to SEQ ID NO: 26118
  Synthetic polypeptide

SEQ ID NO: 30734 - protein, 116 aa, Artificial Sequence
  Synthetic polypeptide
PINKVGQKRRYEIARLHCKNVMPFCCVVMECLPLEVSCRTVMKPKPAQMGRLRGATWTGSSPQGSWDFTRSVCNNTSKTLSDPSDPVFLSGGTSHSVLEWLSQEGCAVPSQLQDGV

SEQ ID NO: 30735 - protein, 263 aa, Artificial Sequence
  Synthetic polypeptide
RGGFHHDCKFPEASPAIRNYLLLSNSCIPFLGSSEGLDFQTLLLDEERGRLLLGAKDHIFLLSLVDLNKNFKKIYWPAAKERVELCKLAGKDANTECANFIRVLQPYNKTHIYVCGTGAFHPICGYIDLGVYKEDIIFKLDTHNLESGRLKCPFDPQQPFASVMTDEYLYSGTASDFLGKDTAFTRSLGPTHDHHYIRTDISEHYWLNGAKFIGTFFIPDTYNPDDDKIYFFFRESSQEGSTSDKTILSRVGRVCKENLCFED

SEQ ID NO: 30736 - protein, 746 aa, Artificial Sequence
  Synthetic polypeptide
RGGFHHDCKFPEASPAIRNYLLLSNSCIPFLGSSEGLDFQTLLLDEERGRLLLGAKDHIFLLSLVDLNKNFKKIYWPAAKERVELCKLAGKDANTECANFIRVLQPYNKTHIYVCGTGAFHPICGYIDLGVYKEDIIFKLDTHNLESGRLKCPFDPQQPFASVMTDEYLYSGTASDFLGKDTAFTRSLGPTHDHHYIRTDISEHYWLNGAKFIGTFFIPDTYNPDDDKIYFFFRESSQEGSTSDKTILSRVGRVCKNDVGGQRSLINKWTTFLKARLICSIPGSDGADTYFDELQDIYLLPTRDERNPVVYGVFTTTSSIFKGSAVCVYSMADIRAVFNGPYAHKESADHRWVQYDGRIPYPRPGTCPSKTYDPLIKSTRDFPDDVISFIKRHSVMYKSVYPVAGGPTFKRINVDYRLTQIVVDHVIAEDGQYDVMFLGTDIGTVLKVVSISKEKWNMEEVVLEELQIFKHSSIILNMELSLKQQQLYIGSRDGLVQLSLHRCDTYGKACADCCLARDPYCAWDGNACSRYAPTSKRRARRQDVKYGDPITQCWDIEDSISHETADEKVIFGIEFNSTFLECIPKSQQATIKWYIQRSGDEHREELKPDERIIKTEYGLLIRSLQKKDSGMYYCKAQEHTFIHTIVKLTLNVIENEQMENTQRAEHEEGKVKDLLAESRLRYKDYIQILSSPNFSLDQYCEQMWHREKRRQRNKGGPKWKHMQEMKKKRNRRHHRDLDELPRAVAT

SEQ ID NO: 30737 - protein, 19 aa, Artificial Sequence
  Synthetic polypeptide
GHMRWLTPVIPALWEAERL

SEQ ID NO: 30738 - protein, 447 aa, Artificial Sequence; identical to SEQ ID NO: 26803
  Synthetic polypeptide

SEQ ID NO: 30739 - protein, 44 aa, Artificial Sequence
  Synthetic polypeptide
MESQMVEQLCSRFYDLPSGAFIYRMGQVFQYKAIPDNAWTRGAE

SEQ ID NO: 30740 - protein, 17 aa, Artificial Sequence
  Synthetic polypeptide
MAHTLQYFKSSQHQRTL

SEQ ID NO: 30741 - protein, 115 aa, Artificial Sequence
  Synthetic polypeptide
GLNEAIFMIPTNPPPTFRKPELWSDDFTDFVKKCLVKNPEQRATATQLLQHPFIKNAKPVSILRDLITEAMEIKAKRHEEQQRELEEEEENSDEDELDSHTMVKTSVESVGTMRA

SEQ ID NO: 30742 - protein, 267 aa, Artificial Sequence
  Synthetic polypeptide
GLNEAIFMIPTNPPPTFRKPELWSDDFTDFVKKCLVKNPEQRATATQLLQHPFIKNAKPVSILRDLITEAMEIKAKRHEEQQRELEEEEENSDEDELDSHTMVKTSVESVGTMRATSTMSEGAQTMIEHNSTMLESDLGTMVINSEDEEEEDGTMKRNATSPQVQRPSFMDYFDKQDFKNKSHENCNQNMHEPFPMSKNVFPDNWKVPQDGDFDFLKNLSLEELQMRLKALDPMMEREIEELRQRYTAKRQPILDAMDAKKRRQQNF

SEQ ID NO: 30743 - protein, 32 aa, Artificial Sequence; identical to SEQ ID NO: 27790
  Synthetic polypeptide

SEQ ID NO: 30744 - protein, 85 aa, Artificial Sequence
  Synthetic polypeptide
PNPIGNSCVKSIHYLCLGFLSFFMELVVTSLLGSVKTVTVPAQELKSLFEKKSLKEKPPISGKQSILSVRLEQCPLQLNNPFNEY

SEQ ID NO: 30745 - protein, 248 aa, Artificial Sequence
  Synthetic polypeptide
PNPIGNSCVKSIHYLCLGFLSFFMELVVTSLLGSVKTVTVPAQELKSLFEKKSLKEKPPISGKQSILSVRLEQCPLQLNNPFNEYSKFDGKGHVGTTATKKIDVYLPLHSSQDRLLPMTVVTMASARVQDLIGLICWQYTSEGREPKLNDNVSAYCLHIAEDDGEVDTDFPPLDSNEPIHKFGFSTLALVEKYSSPGLTSKESLFVRINAAHGFSLIQVDNTKVTMKEILLKAVKRRKGSQKVSGACD

SEQ ID NO: 30746 - protein, 400 aa, Artificial Sequence
  Synthetic polypeptide
PNPIGNSCVKSIHYLCLGFLSFFMELVVTSLLGSVKTVTVPAQELKSLFEKKSLKEKPPISGKQSILSVRLEQCPLQLNNPFNEYSKFDGKGHVGTTATKKIDVYLPLHSSQDRLLPMTVVTMASARVQDLIGLICWQYTSEGREPKLNDNVSAYCLHIAEDDGEVDTDFPPLDSNEPIHKFGFSTLALVEKYSSPGLTSKESLFVRINAAHGFSLIQVDNTKVTMKEILLKAVKRRKGSQKVSGPQYRLEKQSEPNVAVDLDSTLESQSAWEFCLVRENSISGDKVEIDPVTNQKASTKFWIKQKPISIDSDLLCACDLAEEKSPSHAIFKLTYLSNHDYKHLYFESDAATVNEIVLKVNYILESRASTARADYFAQKQRKLNRRTSFSFQKEKKSGQQ

SEQ ID NO: 30747 - protein, 447 aa, Artificial Sequence
  Synthetic polypeptide
PNPIGNSCVKSIHYLCLGFLSFFMELVVTSLLGSVKTVTVPAQELKSLFEKKSLKEKPPISGKQSILSVRLEQCPLQLNNPFNEYSKFDGKGHVGTTATKKIDVYLPLHSSQDRLLPMTVVTMASARVQDLIGLICWQYTSEGREPKLNDNVSAYCLHIAEDDGEVDTDFPPLDSNEPIHKFGFSTLALVEKYSSPGLTSKESLFVRINAAHGFSLIQVDNTKVTMKEILLKAVKRRKGSQKVSGPQYRLEKQSEPNVAVDLDSTLESQSAWEFCLVRENSSRADGVFEEDSQIDIATVQDMLSSHHYKSFKVSMIHRLRFTTDVQLGISGDKVEIDPVTNQKASTKFWIKQKPISIDSDLLCACDLAEEKSPSHAIFKLTYLSNHDYKHLYFESDAATVNEIVLKVNYILESRASTARADYFAQKQRKLNRRTSFSFQKEKKSGQQ

SEQ ID NO: 30748 - protein, 411 aa, Artificial Sequence
  Synthetic polypeptide
PNPIGNSCVKSIHYLCLGFLSFFMELVVTSLLGSVKTVTVPAQELKSLFEKKSLKEKPPISGKQSILSVRLEQCPLQLNNPFNEYSKFDGKGHVGTTATKKIDVYLPLHSSQDRLLPMTVVTMASARVQDLIGLICWQYTSEGREPKLNDNVSAYCLHIAEDDGEVDTDFPPLDSNEPIHKFGFSTLALVEKYSSPGLTSKESLFVRINAAHGFSLIQVDNTKVTMKEILLKAVKRRKGSQKVSGSRADGVFEEDSQIDIATVQDMLSSHHYKSFKVSMIHRLRFTTDVQLGISGDKVEIDPVTNQKASTKFWIKQKPISIDSDLLCACDLAEEKSPSHAIFKLTYLSNHDYKHLYFESDAATVNEIVLKVNYILESRASTARADYFAQKQRKLNRRTSFSFQKEKKSGQQ

SEQ ID NO: 30749 - protein, 63 aa, Artificial Sequence; identical to SEQ ID NO: 28191
  Synthetic polypeptide

SEQ ID NO: 30750 - protein, 184 aa, Artificial Sequence
  Synthetic polypeptide
CCACKRLGHGHIQREDHVKTHGERCHLQAKETDLRRNQSQSHLNVGLLASRTIGIIGGTGLDDPEILEGRTEKYVDTPFGKPSDALILGKIKNVDCVLLARHGRQHTIMPSKVNYQANIWALKEEGCTHVIVTTACGSLREEIQPGDIVIIDQFIDRTICHDISKDSKREYWCPCCDDSSAPLI

SEQ ID NO: 30751 - protein, 283 aa, Artificial Sequence
  Synthetic polypeptide
CCACKRLGHGHIQREDHVKTHGERCHLQAKETDLRRNQSQSHLNVGLLASRTIGIIGGTGLDDPEILEGRTEKYVDTPFGKPSDALILGKIKNVDCVLLARHGRQHTIMPSKVNYQANIWALKEEGCTHVIVTTACGSLREEIQPGDIVIIDQFIDRTTMRPQSFYDGSHSCARGVCHIPMAEPFCPKTREVLIETAKKLGLRCHSKGTMVTIEGPRFSSRAESFMFRTWGADVINMTTVPEVVLAKEAGICYASIAMATDYDCWKEHEEACYCFSRFRWTGS

SEQ ID NO: 30752 - protein, 375 aa, Artificial Sequence
  Synthetic polypeptide
CCACKRLGHGHIQREDHVKTHGERCHLQAKETDLRRNQSQSHLNVGLLASRTIGIIGGTGLDDPEILEGRTEKYVDTPFGKPSDALILGKIKNVDCVLLARHGRQHTIMPSKVNYQANIWALKEEGCTHVIVTTACGSLREEIQPGDIVIIDQFIDRTTMRPQSFYDGSHSCARGVCHIPMAEPFCPKTREVLIETAKKLGLRCHSKGTMVTIEGPRFSSRAESFMFRTWGADVINMTTVPEVVLAKEAGICYASIAMATDYDCWKEHEEAVSVDRVLKTLKENANKAKSLLLTTIPQIGSTEWSETLHNLKMIKFQMILSEGYHPFNIQESPFYRGLLDFPSVGHGRGEILPLSPLDLAGYCFQQPMQPPCPDS

SEQ ID NO: 30753 - protein, 324 aa, Artificial Sequence
  Synthetic polypeptide
CCACKRLGHGHIQREDHVKTHGERCHLQAKETDLRRNQSQSHLNVGLLASRTIGIIGGTGLDDPEILEGRTEKYVDTPFGKPSDALILGKIKNVDCVLLARHGRQHTIMPSKVNYQANIWALKEEGCTHVIVTTACGSLREEIQPGDIVIIDQFIDRTTMRPQSFYDGSHSCARGVCHIPMAEPFCPKTREVLIETAKKLGLRCHSKGTMVTIEGPRFSSRAESFMFRTWGADVINMTTVPEVVLAKEAGICYASIAMATDYDCWKEHEEAVSVDRVLKTLKENANKAKSLLLTTIPQIGSTEWSETLHNLKNMAQFSVLLPRH

SEQ ID NO: 30754 - protein, 91 aa, Artificial Sequence
  Synthetic polypeptide
CCACKRLGHGHIQREDHVKTHGERCHLQAKETDLRRNQSQSHLNVGLLASRTIGIIGGTGLDDPEILEGRTEKYVDTPFGKVNIQLVETSI

SEQ ID NO: 30755 - protein, 480 aa, Artificial Sequence
  Synthetic polypeptide
FSQTFKKLSYTLFSRARKKKKKKKESLEASMMLKTQSVDDVVDESDDNDDIDVEAENETENEDDLDQNFKNDDIETDINKLKPQQEPGRTIEDLKMYEHLFPELVDDFQDYDLISKEPKPFVFEGKVRGPIVVPTAGEETSGNSGNLRKVVMKENISSKGDEGEKKSTFMDLAKEDIKDNDRTLQQQPGDQNRTISSVHGLNNDIVKALDRITLQNIPSQTAPGFTAEMKKDCSLPLTVLTCAKACPHMATCGNVLFEGRTVQLGKLCCTGVETEDDEDTESNSSVEQASVEVPDGPTLHDPDLYIEIVKNTKSVPEYSEVAYPDYFGHIPPPFKEPILERPYGVQRTKIAQDIERLIHQSDIIDRVVYDLDNPNYTIPEEGDILKFNSKFESGNLRKVIQIRKNEYDLILNSDINSNHYHQWFYFEVSGMRPGVAYRFNIINCEKSNSQFNYALPLMSWMKMNLDSLKKLITVQKVMMS

SEQ ID NO: 30756 - protein, 901 aa, Artificial Sequence
  Synthetic polypeptide
FSQTFKKLSYTLFSRARKKKKKKKESLEASMMLKTQSVDDVVDESDDNDDIDVEAENETENEDDLDQNFKNDDIETDINKLKPQQEPGRTIEDLKMYEHLFPELVDDFQDYDLISKEPKPFVFEGKVRGPIVVPTAGEETSGNSGNLRKVVMKENISSKGDEGEKKSTFMDLAKEDIKDNDRTLQQQPGDQNRTISSVHGLNNDIVKALDRITLQNIPSQTAPGFTAEMKKDCSLPLTVLTCAKACPHMATCGNVLFEGRTVQLGKLCCTGVETEDDEDTESNSSVEQASVEVPDGPTLHDPDLYIEIVKNTKSVPEYSEVAYPDYFGHIPPPFKEPILERPYGVQRTKIAQDIERLIHQSDIIDRVVYDLDNPNYTIPEEGDILKFNSKFESGNLRKVIQIRKNEYDLILNSDINSNHYHQWFYFEVSGMRPGVAYRFNIINCEKSNSQFNYGMQPLMYSVQEALNARPWWIRMGTDICYYKNHFSRSSVAAGGQKGKSYYTITFTVNFPHKDDVCYFAYHYPYTYSTLQMHLQKLESAHNPQQIYFRKDVLCETLSGNSCPLVTITAMPESNYYEHICHFRNRPYVFLSARVHPGETNASWVMKGTLEYLMSNNPTAQSLRESYIFKIVPMLNPDGVINGNHRCSLSGEDLNRQWQSPSPDLHPTIYHAKGLLQYLAAVKRLPLVYCDYHGHSRKKNVFMYGCSIKETVWHTNDNATSCDVVEDTGYRTLPKILSHIAPAFCMSSCSFVVEKSKESTARVVVWREIGVQRSYTMESTLCGCDQGKYKGLQIGTRELEEMGAKFCVGLLRLKRLTSPLEYNLPSSLLDFENDLIESSCKVTSPTTYVLDEDEPRFLEEVDYSAESNDELDIELAENVGDYEPSAQEEVLSDSELSRTYLP

SEQ ID NO: 30757 - protein, 54 aa, Artificial Sequence
  Synthetic polypeptide
GRAWWLTPVIPARWEAEAGRSRGQEMETILANMISRSCSVNNKVSKKTTKPPTL

SEQ ID NO: 30758 - protein, 61 aa, Artificial Sequence
  Synthetic polypeptide
GRAWWLTPVIPARWEAEAGRSRGQEMETILANMISRSCSVNNKVSKKTTKPPTLRSFLSPI

SEQ ID NO: 30759 - protein, 45 aa, Artificial Sequence
  Synthetic polypeptide
PGVVAHACNPSTLGGRGGQITRSRDGDHPSQHDGVLLCCPGWSTM

SEQ ID NO: 30760 - protein, 90 aa, Artificial Sequence
  Synthetic polypeptide
GQTRWLTPVIPALWEAKAGGSPEVRRSRPAWPIWRNPVSTKNTKISWVWWHVLVIPATQEAEAGESLEPGKWRLLGAEIAPLHSSLDGLS

SEQ ID NO: 30761 - protein, 726 aa, Artificial Sequence
  Synthetic polypeptide
MEEVRCPEHGTFCFLKTGVRDGPNKGKSFYVCRADTCSFVRATDIPVSHCLLHEDFVVELQGLLLPQDKKEYRLFFRCIRSKAEGKRWCGSIPWQDPDSKEHSVSNKSQHASETFHHSSNWLRNPFKVLDKNQEPALWKQLIKGEGEEKKADKKQREKGDQLFDQKKEQKPEMMEKDLSSGLVPKKKQSVVQEKKQEEGAEIQCEAETGGTHKRDFSEIKSQQCQGNELTRPSASSQEKSSGKSQDVQRESEPLREKVTQLLPQNVHSHNSISKPQKGGPLNKEYTNWEAKETKAKDGPSIQATQKSLPQGHFQERPETHSVPAPGGPAAQAAPAAPGLSLGEGREAATSSDDEEEDDVVFVSSKPGSPLLFDSTLDLETKENLQFPDRSVQRKVSPASGVSKKVEPSDPVARRVYLTTQLKQKKSTLASVNIQALPDKGQKLIKQIQELEEVLSGLTLSPEQGTNEKSNSQVPQQSHFTKTTTGPPHLVPPQPLPRRGTQPVGSLELKSACQVTAGGSSQCYRGHTNQDHVHAVWKITSEAIGQLHRSLESCPGETVVAEDPAGLKVPLLLHQKQALAWLLWRESQKPQGGILADDMGLGKTLTMIALILTQKNQEKKEEKEKSTALTWLSKDDSCDFTSHGTLIICPASLIHHWKNEVEKRVNSNKLRVYLYHGPNRDSRARVLSTYDIVITTYSLVAKEIPTNKQEAEIPGANLNVEILSSCR

SEQ ID NO: 30762 - protein, 495 aa, Artificial Sequence
  Synthetic polypeptide
MLHTEGHALLRAVGQGKLRLARLLLEGGAYVNEGDAQGETALMAACRARYDDPQNKARMVRYLLEQGADPNIADRLGRTALMHACAGGGGAAVASLLLAHGADPSVRDHAGASALVHALDRGDRETLATLLDACKAKGTEVIIITTDTSPSGTKKTRQYLNSPPSPGVEDPAPASPSPGFCTSPSEIQLQTAGGGGRGMLSPRAQEEEEKRDVFEFPLPKPPDDPSPSEPLPKPPRHPPKPLKRLNSEPWGLVAPPQPVPPTEGRPGIERLTAEFNGLTLTGRPRLSRRHSTEGPEDPPPWAEKVTSGGPLSRRNTAPEAQESGPPSGLRQKLSRMEPVELDTPGHLCPDSPESSRLSLERRRYSASPLTLPPAGSAPSPRQSQESLPGAVSPLSGRRRSPGLLERRGSGTLLLDHISQTRPGFLPPLNVSPHPPIPDIRPQPGGRAPSLPAPPYAGAPGSPRTKRKLLHHQLHMMLDKSNYFSEPQYPHLQSVK

SEQ ID NO: 30763 - protein, 71 aa, Artificial Sequence
  Synthetic polypeptide
MATAGGGSGADPGSRGLLRLLSFCVLLAGLCRGNSVERKIYIPLNKTAPCVRLLNATHQIGCQYTHRGKTV

SEQ ID NO: 30764 - protein, 305 aa, Artificial Sequence
  Synthetic polypeptide
MARLRDCLPRLMLTLRSLLFWSLVYCYCGLCASIHLLKLLWSLGKGPAQTFRRPAREHPPACLSDPSLGTHCYVRIKDSGLRFHYVAAGERGKPLMLLLHGFPEFWYSWRYQLREFKSEYRVVALDLRGYGETDAPIHRQNYKLDCLITDIKDILDSLGYSKCVLIGHDWGGMIAWLIAICYPEMVMKLIVINFPHPNVFTEYILRHPAQLLKSSYYYFFQIPWFPEFMFSINDFKVLKHLFTSHSTGIGRKGCQLTTEDLEAYIYVFSQPGALSGPINHYRNIFSCISMGNFGGPGKFYWYLRE

SEQ ID NO: 30765 - protein, 21 aa, Artificial Sequence
  Synthetic polypeptide
MDLVQVSGSLGSPVLSCKVRI

SEQ ID NO: 30766 - protein, 853 aa, Artificial Sequence; identical to SEQ ID NO: 30446
  Synthetic polypeptide

SEQ ID NO: 30767 - protein, 20 aa, Artificial Sequence
  Synthetic polypeptide
MIVMNDQMDSSLKAGSMPCS

SEQ ID NO: 30768 - protein, 117 aa, Artificial Sequence
  Synthetic polypeptide
MPPYTVVYFPVRGRCAALRMLLADQGQSWKEEVVTVETWQEGSLKASCLYGQLPKFQDGDLTLYQSNTILRHLGRTLGLYGKDQQEAALVDMVNDGVEDLRCKYISLIYTNYAEGKE

SEQ ID NO: 30769 - protein, 120 aa, Artificial Sequence
  Synthetic polypeptide
MALRICVTYTPALPIGLCTRCCLCLEQSPSWCHCLRGVSFLTFHLHQSVPLGDRDSLLMFTRQAGHFVEGSKAGRSRGRLCLSQALRVAVSVLSPGKWNFPPPRDVMMIDVTSSAQCLYR

SEQ ID NO: 30770 - protein, 13 aa, Artificial Sequence
  Synthetic polypeptide
MAALTIATGLAVD

SEQ ID NO: 30771 - protein, 409 aa, Artificial Sequence
  Synthetic polypeptide
MSIHFSSPVFTSRSAAFSGRGAQVRLSSARPGGLGSSSLYGLGASRPRVAVRSAYGGPVGAGIREVTINQSLLAPLRLDADPSLQRVRQEESEQIKTLNNKFASFIDKVRFLEQQNKLLETKWTLLQEQKSAKSSRLPDIFEAQIAGLRGQLEALQVDGGRLEAELRSMQDVVEDFKNKYEDEINHRTAAENEFVVLKKDVDAAYMSKVELEAKVDALNDEINFLRTLNETELTELQSQISDTSVVLSMDNSRSLDLDGIIAEVKAQYEEMAKCSRAEAEAWYQTKFETLQAQAGKHGDDLRNTRNEISEMNRAIQRLQAEIDNIKNQRAKLEAAIAEAEERGELALKDARAKQEELEAALQRGKQDMARQLQSANYGHMQASCLSIKFSWNPVIPLPSSIAFGCGCFT

SEQ ID NO: 30772 - protein, 77 aa, Artificial Sequence
  Synthetic polypeptide
MEFWLSWVFLVAILKGVQCEVQLVESGGGLIQPGGSLRLSCAASGFTVSSNYMSWVRQAPGKGLEWVSQISESTNSL

SEQ ID NO: 30773 - protein, 35 aa, Artificial Sequence
  Synthetic polypeptide
MSSINPNTSATWKCKSIKLLSFLSCPALGMSLSVA

SEQ ID NO: 30774 - protein, 290 aa, Artificial Sequence
  Synthetic polypeptide
MWPQPRLPPHPAMSEKTQQGKLAAAKKKLKAYWQRKSPGIPAGANRKKKVNGSSPDTATSGGYHSPGDSATGIYGEGRASSTTLQDLESQYQELAVALDSSSAIISQLTENINSLVRTSKEEKKHEIHLVQKLGRSLFKLKNQTAEPLAPQPPAGPSKVEQLQDETNHLRKELESVGRQLQAEVENNQMLSLLNRRQEERLREQEERLREQEERLCEQEERLCEQEERLREQEERLCEQEKLPGQERLLEEVEKLLKQERRQEEQERLLERERLLDEAAGEGEAAGRGGG

SEQ ID NO: 30775 - protein, 168 aa, Artificial Sequence
  Synthetic polypeptide
MQIFVKTLTGKTITLEVEPSDTIENVKAKIQDKEGIPPDQQRLIFAGKQLEDGRTLSDYNIQKESTLHLVLRLRGGMQIFVKTLTGKTITLEVEPRHDGRAGHTSIIITSSLLEFRKSQPALTSTQILSLVRNIYNLFSLKFATWKLHLPDKTLVSTTPYQNPGISFY

SEQ ID NO: 30776 - protein, 18 aa, Artificial Sequence
  Synthetic polypeptide
MPGPLRSLEMARRDGSRL

SEQ ID NO: 30777 - protein, 150 aa, Artificial Sequence
  Synthetic polypeptide
MAEPDPSHPLETQAGKVQEAQDSDSDSEGGAAGGEADMDFLRNLFSQTLSLGSQKERLLDELTLEGVARYMQSERCRRVICLVGAGISTSAGIPDFRSPSTGLYDNLEKYHLPYPEAIFEISYFKKHPEPFFALAKELYPGQFKPPICLL

SEQ ID NO: 30778 - protein, 977 aa, Artificial Sequence; identical to SEQ ID NO: 30475
  Synthetic polypeptide

SEQ ID NO: 30779 - protein, 52 aa, Artificial Sequence; identical to SEQ ID NO: 2555
  Synthetic polypeptide

SEQ ID NO: 30780 - protein, 23 aa, Artificial Sequence
  Synthetic polypeptide
MSDQEKGPIVSSGVRDSSKWLRT

SEQ ID NO: 30781 - protein, 144 aa, Artificial Sequence
  Synthetic polypeptide
MDEKYVNSIWDLLKNAIQEIQRKNNSGLSFEELYRNAYTMVLHKHGEKLYTGLREVVTEHLINKVREDVLNSLNNNFLQTLNQAWNDHQTAMVMIRDILMYMVWWCVPMMPATRRLRQENCLNLGGRGCRKPRSCHCTLAWMTE

SEQ ID NO: 30782 - protein, 24 aa, Artificial Sequence
  Synthetic polypeptide
METPAQLLFLLLLWLPAEAGGIMR

SEQ ID NO: 30783 - protein, 13 aa, Artificial Sequence
  Synthetic polypeptide
MASICPFLKQWLN

SEQ ID NO: 30784 - protein, 21 aa, Artificial Sequence
  Synthetic polypeptide
MASTISAGCGGGACGPSYSGG

SEQ ID NO: 30785 - protein, 356 aa, Artificial Sequence
  Synthetic polypeptide
MKKKLVVLGLLAVVLVLVIVGLCLWLPSASKEPDNHVYTRAAMAADAKQCLEIGRDTLRDGGSAVDAAIAALLCVGLMNAHSMGIGVGLFLTIYNSTTRKAEVINAREVAPRLAFASMFNSSEQSQKGGLSVAVPGEIRGYELAHQRHGRLPWARLFQPSIQLARQGFPVGKGLAAVLENKRTVIEQQPVLWYVFCRDRKVLREGERLTLPRLADTYEMLAIEGAQAFYNGSLMAQIVKDIQAAGGIVTAEDLNNYRAELIEHPLNISLGDAVLYMPSARLSGPVLALILNILKGYNFSRESVETPEQKGLTYHRIVEAFRFAYAKRTLLGDPKFVDVTECQACSANSRNIFCMKE

SEQ ID NO: 30786 - protein, 283 aa, Artificial Sequence; identical to SEQ ID NO: 30482
  Synthetic polypeptide

SEQ ID NO: 30787 - protein, 208 aa, Artificial Sequence
  Synthetic polypeptide
MKGSNRNKDHSAEGEGVGKRPKRKCLQWHPLLAKKLLDFSEEEEEEDEEEDIDKVQLLGADGLEQDVGETEDDESPEQRARRPMNAFLLFCKRHRSLVRQEHPRLDNRGATKILADWWAVLDPKEKQKYTDMAKEYKDAFMKANPGYKWCPTTNKPVKSPTPTVNPRKKLWAFPSDSSRDLPSPKKAKTEEMPQLNFGMAVLYGGMCL

SEQ ID NO: 30788 - protein, 28 aa, Artificial Sequence
  Synthetic polypeptide
MTLATDGTADMFGIRWGQATSQGTEAAS

SEQ ID NO: 30789 - protein, 45 aa, Artificial Sequence; identical to SEQ ID NO: 30485
  Synthetic polypeptide

SEQ ID NO: 30790 - protein, 193 aa, Artificial Sequence
  Synthetic polypeptide
MNGDSRAAVVTSPPPTTAPHKERYFDRVDENNPEYLRERNMAPDLRQDFNMMEQKKRVSMILQSPAFCEELESMIQEQFKKGKNPTGLLALQQIADFMTTNVPNVYPAAPQGGMAALNMSLGMVTPVNDLRGSDSIAYDKGEKLLRCKLAAFYRLADLFGWSQLIYNHITEYKFHRESVCCGPCCGPRTRGKE

SEQ ID NO: 30791 - protein, 838 aa, Artificial Sequence
  Synthetic polypeptide
MAAQPRGGDYRGFFLLSILLGTPWEAWAGRILYSVSEETDKGSFVGDIAKDLGLEPRELAERGVRIISRGRTQLFALNQRSGSLVTAGRIDREEICAQSARCLVNFNILMEDKMNLYPIDVEIIDINDNVPRFLTEEINVKIMENTAPGVRFPLSEAGDPDVGTNSLQSYQLSPNRHFSLAVQSGDDETKYPELVLERVLDREEERVHHLVLTASDGGDPPRSSTAHIQVTVVDVNDHTPVFSLPQYQVTVPENVPVGTRLLTVHAIDLDEGVNGEVTYSFRKITPKLPKMFHLNSLTGEISTLEGLDYEETAFYEMEVQAQDGPGSLTKAKVLITVLDVNDNAPEVTMTSLSSSIPEDTPLGTVIALFYLQDRDSGKNGEVTCTIPENLPFKLEKSIDNYYRLVTTKNLDRETLSLYNITLKATDGGTPPLSRETHIFMQVADTNDNPPTFPHSSYSVYIAENNPRGASIFLVTAQDHDSEDNAQITYSLAEDTIQGAPVSSYVSINSDTGVLYALQSFDYEQLRELQLRVTAHDSGDPPLSSNMSLSLFVLDQNDNPPEILYPALPTDGSTGMELAPRSAEPGYLVTKVVAVDKDSGQNAWLSYLLLKASEPGLFAVGLYTGEVRTARALLDRDALKQSLVVAVQDHGQPPLSATVTLTVAVADSIPEVLADLGSLEPSDGPYNYDLTLYLVVAVATVSCVFLAFVLVLLALRLRRWHKSRLLQASEGGLANVPTSHFVGMDGVQAFLQTYSHEVSLTADSRKSHLIFPQPNYVDMLISQESCEKNDSLLTSVDFQECKENLPSIQPGMVLQAVAHLHGRLRQEDSLNPRIGGPPR

SEQ ID NO: 30792 - protein, 12 aa, Artificial Sequence
  Synthetic polypeptide
METDLECSDSRL

SEQ ID NO: 30793 - protein, 137 aa, Artificial Sequence
  Synthetic polypeptide
MVNKDMNGFPVKKCSAFQFFKKRVRRWIKSPMVSVDKHQSPSLKYTGSSMVHIPPGEPDFESSLCQTCLGEHAFQRGVLPQENESCSWETQSGCEVREPCNHANILTKPDPRTFWTNDDPGLEVLVPEGGVLPETQQ

SEQ ID NO: 30794 - protein, 1047 aa, Artificial Sequence
  Synthetic polypeptide
MAPPTGVLSSLLLLVTIAGCARKQCSEGRTYSNAVISPNLETTRIMRVSHTFPVVDCTAACCDLSSCDLAWWFEGRCYLVSCPHKENCEPKKMGPIRSYLTFVLRPVQRPAQLLDYGDMMLNRGSPSGIWGDSPEDIRKDLTFLGKDWGLEEMSEYSDDYRELEKDLLQPSGKQEPRGSAEYTDWGLLPGSEGAFNSSVGDSPAVPAETQQDPELHYLNESASTPAPKLPERSVLLPLPTTPSSGEVLEKEKASQLQEQSSNSSGKEVLMPSHSLPPASLELSSVTVEKSPVLTVTPGSTEHSIPTPPTSAAPSESTPSELPISPTTAPRTVKELTVSAGDNLIITLPDNEVELKAFVAPAPPVETTYNYEWNLISHPTDYQGEIKQGHKQTLNLSQLSVGLYVFKVTVSSENAFGEGFVNVTVKPARRVNLPPVAVVSPQLQELTLPLTSALIDGSQSTDDTEIVSYHWEEINGPFIEEKTSVDSPVLRLSNLDPGNYSFRLTVTDSDGATNSTTAALIVNNAVDYPPVANAGPNHTITLPQNSITLNGNQSSDDHQIVLYEWSLGPGSEGKHVVMQGVQTPYLHLSAMQEGDYTFQLKVTDSSRQQSTAVVTVIVQPENNRPPVAVAGPDKELIFPVESATLDGSSSSDDHGIVFYHWEHVRGPSAVEMENIDKAIATVTGLQVGTYHFRLTVKDQQGLSSTSTLTVAVKKENNSPPRARAGGRHVLVLPNNSITLDGSRSTDDQRIVSYLWIRDGQSPAAGDVIDGSDHSVALQLTNLVEGVYTFHLRVTDSQGASDTDTATVEVQPDPRKSGLVELTLQVGVGQLTEQRKDTLVRQLAVLLNVLDSDIKVQKIRAHSDLSTVIVFYVQSRPPFKVLKAAEVARNLHMRLSKEKADFLLFKVLRVDTAGCLLKCSGHGHCDPLTKRCICSHLWMENLIQRYIWDGESNCEWSIFYVTVLAFTLIVLTGGFTWLCICCCKRQKRTKIRKKTKYTILDNMDEQERMELRPKYEEEIRTCRETSGARRHRGKIMGGHGKKAAIYKPR

SEQ ID NO: 30795 - protein, 13 aa, Artificial Sequence
  Synthetic polypeptide
MEQFVQVYNWIDV

SEQ ID NO: 30796 - protein, 14 aa, Artificial Sequence
  Synthetic polypeptide
MLEKLEFEDEVPGP

SEQ ID NO: 30797 - protein, 313 aa, Artificial Sequence
  Synthetic polypeptide
MDDDIAALVVDNGSGMCKAGFAGDDAPRAVFPSIVGRPRHQGVMVGMGQKDSYVGDEAQSKRGILTLKYPIEHGIVTNWDDMEKIWHHTFYNELRVAPEEHPVLLTEAPLNPKANREKMTQIMFETFNTPAMYVAIQAVLSLYASGRTTGIVMDSGDGVTHTVPIYEGYALPHAILRLDLAGRDLTDYLMKILTERGYSFTTTAEREIVRDIKEKLCYVALDFEQEMATAASSSSLEKSYELPDGQVITIGNERFRCPEALFQPSFLGMESCGIHETTFNSIMKCDVDIRKDLYANTVMSVELNAASGTRWAP

SEQ ID NO: 30798 - protein, 212 aa, Artificial Sequence; identical to SEQ ID NO: 30493
  Synthetic polypeptide

SEQ ID NO: 30799 - protein, 46 aa, Artificial Sequence
  Synthetic polypeptide
METQADLVSQEPQALLDSALREAEAGRSQGQEIETILANTVKPHLY

SEQ ID NO: 30800 - protein, 20 aa, Artificial Sequence
  Synthetic polypeptide
MMVNCHAHFWVSTYLSPHLL

SEQ ID NO: 30801 - protein, 11 aa, Artificial Sequence
  Synthetic polypeptide
MGISIVKQCMT

SEQ ID NO: 30802 - protein, 657 aa, Artificial Sequence
  Synthetic polypeptide
MALLAMHSWRWAAAAAAFEKRRHSAILIRPLVSVSGSGPQWRPHQLGALGTARAYQALQVWPLIEKRTCWHGHAGGGLHTDPKEGLKDVDTRKIIKAMLSYVWPKDRPDLRARVAISLGFLGGAKAMNIVVPFMFKYAVDSLNQMSGNMLNLSDAPNTVATMATAVLIGYGVSRAGAAFFNEVRNAVFGKVAQNSIRRIAKNVFLHLHNLDLGFHLSRQTGALSKAIDRGTRGISFVLSALVFNLLPIMFEVMLVSGVLYYKCGAQFALVTLGTLGTYTAFTVAVTRWRTRFRIEMNKADNDAGNAAIDSLLNYETVKYFNNERYEAQRYDGFLKTYETASLKSTSTLAMLNFGQSAIFSVGLTAIMVLASQGIVAGTLTVGDLVMVNGLLFQLSLPLNFLGTVYRETRQALIDMNTLFTLLKVDTQIKDKVMASPLQITPQTATVAFDNVHFEYIEGQKVLSGISFEVPAGKKVAIVGGSGSGKSTIVRLLFRFYEPQKGSIYLAGQNIQDVSLESLRRAVGVVPQDAVLFHNTIYYNLLYGNISASPEEVYAVAKLAGLHDAILRMPHGYDTQVGERGLKLSGGEKQRVAIARAILKDPPVILYDEATSSLDSITEETILGAMKDVVKHRTSIFIAHRLSTVVDADEIIVLDQEK

SEQ ID NO: 30803 - protein, 43 aa, Artificial Sequence
  Synthetic polypeptide
GRARWLTPVIPAFWEAEAGGSRGQEIQTILANTCIPRKDKGCI

SEQ ID NO: 30804 - protein, 77 aa, Artificial Sequence
  Synthetic polypeptide
ARHGGSRLSSQHLGGQEPEQLPEKRRTSKAFWNSPRRSGWRVPLKWTGPTISQSWPFTSCPLSSGEPHVWKSCGGCW

SEQ ID NO: 30805 - protein, 96 aa, Artificial Sequence
  Synthetic polypeptide
LFPFTSSLLICEVEGRMPTSQGHREDQMSSWSISTSVQPSGRAAASASRPTGSLSVAGAAASAGAPSTSTVPALPAPGSTGPATMSSAPTLKSPRF

SEQ ID NO: 30806 - protein, 28 aa, Artificial Sequence
  Synthetic polypeptide
PQNSTASVSEAERKAQVYYRACMNETRI

SEQ ID NO: 30807 - protein, 109 aa, Artificial Sequence; identical to SEQ ID NO: 5815
  Synthetic polypeptide

SEQ ID NO: 30808 - protein, 28 aa, Artificial Sequence
  Synthetic polypeptide
ALELGVVSQPSVYRWWSHAHRHLSGWSR

SEQ ID NO: 30809 - protein, 46 aa, Artificial Sequence; identical to SEQ ID NO: 6257
  Synthetic polypeptide

SEQ ID NO: 30810 - protein, 40 aa, Artificial Sequence; identical to SEQ ID NO: 6472
  Synthetic polypeptide

SEQ ID NO: 30811 - protein, 54 aa, Artificial Sequence; identical to SEQ ID NO: 30531
  Synthetic polypeptide

SEQ ID NO: 30812 - protein, 1624 aa, Artificial Sequence
  Synthetic polypeptide
DLEFETSLANKVLLHEEAGDSGFVSLSRLGPSLRDKDLEMEELMLQDETLLGTMQSYMDASLISLIEDFGSLGESRLSLEDQNEVSLLTALTEILDNADSENLSPFDSIPDSELLVSPREGSSLHKLLTLSRTPPERDLITPVDPLGPSTGSSRGSGVEMSLPDPSWDFSPPSFLETSSPKLPSWRPPRSRPRWGQSPPPQQRSDGEEEEEVASFSGQILAGELDNCVSSIPDFPMHLACPEEEDKATAAEMAVPAAGDESISSLSELVRAMHPYCLPNLTHLASLEDELQEQPDDLTLPEGCVVLEIVGQAATAGDDLEIPVVVRQVSPGPRPVLLDDSLETSSALQLLMPTLESETEAAVPKVTLCSEKEGLSLNSEEKLDSACLLKPREVVEPVVPKEPQNPPANAAPGSQRARKGRKKKSKEQPAACVEGYARRLRSSSRGQSTVGTEVTSQVDNLQKQPQEELQKESGPLQGKGKPRAWARAWAAALENSSPKNLERSAGQSSPAKEGPLDLYPKLADTIQTNPIPTHLSLVDSAQASPMPVDSVEADPTAVGPVLAGPVPVDPGLVDLASTSSELVEPLPAEPVLINPVLADSAAVDPAVVPISDNLPPVDAVPSGPAPVDLALVDPVPNDLTPVDPVLVKSRPTDPRRGAVSSALGGSAPQLLVESESLDPPKTIIPEVKEVVDSLKIESGTSATTHEARPRPLSLSEYRRRRQQRQAETEERSPQPPTGKWPSLPETPTGLADIPCLVIPPAPAKKTALQRSPETPLEICLVPVGPSPASPSPEPPVSKPVASSPTEQVPSQEMPLLARPSPPVQSVSPAVPTPPSMSAALPFPAGGLGMPPSLPPPPLQPPSLPLSMGPVLPDPFTHYAPLPSWPCYPHVSPSGYPCLPPPPTVPLVSGTPGAYAVPPTCSVPWAPPPAPVSPYSSTCTYGPLGWGPGPQHAPFWSTVPPPPLPPASIGRAVPQPKMESRGTPAGPPENVLPLSMAPPLSLGLPGHGAPQTEPTKVEVKPVPASPHPKHKVSALVQSPQMKALACVSAEGVTVEEPASERLKPETQETRPREKPPLPATKAVPTPRQSTVPKLPAVHPARLRKLSFLPTPRTQGSEDVVQAFISEIGIEASDLSSLLEQFEKSEAKKECPPPAPADSLAVGNSGGVDIPQEKRPLDRLQAPELANVAGLTPPATPPHQLWKPLAAVSLLAKAKSPKSTAQEGTLKPEGVTEAKHPAAVRLQEGVHGPSRVHVGSGDHDYCVRSRTPPKKMPALVIPEVGSRWNVKRHQDITIKPVLSLGPAAPPPPCIAASREPLDHRTSSEQADPSAPCLAPSSLLSPEASPCRNDMNTRTPPEPSAKQRSMRCYRKACRSASPSSQGWQGRRGRNSRSVSSGSNRTSEASSSSSSSSSSSRSRSRSLSPPHKRWRRSSCSSSGRSRRCSSSSSSSSSSSSSSSSSSSSRSRSRSPSPRRRSDRRRRYSSYRSHDHYQRQRVLQKERAIEERRVVFIGKIPGRMTRSELKQRFSVFGEIEECTIHFRVQGDNYGFVTYRYAEEAFAAIESGHKLRQADEQPFDLCFGGRRQFCKRSYSDLDSNREDFDPAPVKSKFDSLDFDTLLKQAQKNLRR

SEQ ID NO: 30813 - protein, 53 aa, Artificial Sequence; identical to SEQ ID NO: 30532
  Synthetic polypeptide

SEQ ID NO: 30814 - protein, 27 aa, Artificial Sequence
  Synthetic polypeptide
SLTLERPVELKFCRLLNGLGEEIKQLQ

SEQ ID NO: 30815 - protein, 131 aa, Artificial Sequence
  Synthetic polypeptide
MGVVAHTCNPNTLGGQGIEMHQRLSNIERNWPYYFGFGLPLAFLTAMQSSYIISGCLFSILFPLFIISANEAKPGKAYLFQLRLFSLVVFLSNRLFHKTVYLQSALSSSTSAEKFPSPHPSPAKLKATAGH

SEQ ID NO: 30816 - protein, 17 aa, Artificial Sequence
  Synthetic polypeptide
ATQKTDDSLGLGLKTMV

SEQ ID NO: 30817 - protein, 61 aa, Artificial Sequence
  Synthetic polypeptide
SQILGMQSLALVAQSGVQWRDLSSLQPPPPGFKRFSCLSLPNRCNPERFTWCCTSTFCDRQ

SEQ ID NO: 30818 - protein, 64 aa, Artificial Sequence; identical to SEQ ID NO: 8418
  Synthetic polypeptide

SEQ ID NO: 30819 - protein, 25 aa, Artificial Sequence
  Synthetic polypeptide
QIGCYQGFAFAWKCLLHSCTTEKDR

SEQ ID NO: 30820 - protein, 14 aa, Artificial Sequence
  Synthetic polypeptide
RVAASSPIMRKQMP

SEQ ID NO: 30821 - protein, 21 aa, Artificial Sequence
  Synthetic polypeptide
MLGTRPHGRSWKDIFDHQIHV

SEQ ID NO: 30822 - protein, 66 aa, Artificial Sequence; identical to SEQ ID NO: 30552
  Synthetic polypeptide

SEQ ID NO: 30823 - protein, 21 aa, Artificial Sequence
  Synthetic polypeptide
KLILCLNDCKRCQRMCSRMCK

SEQ ID NO: 30824 - protein, 21 aa, Artificial Sequence
  Synthetic polypeptide
MGAVAHTCNPSTLGGQGKEVI

SEQ ID NO: 30825 - protein, 41 aa, Artificial Sequence
  Synthetic polypeptide
KHTDLQATAIGKSCGGIPLVWTSAAGRGPEAPCRNSTTQSR

SEQ ID NO: 30826 - protein, 31 aa, Artificial Sequence
  Synthetic polypeptide
RDLVSTKQLKKKLGVGSDSEVEERSGLVFLQ

SEQ ID NO: 30827 - protein, 68 aa, Artificial Sequence; identical to SEQ ID NO: 9342
  Synthetic polypeptide

SEQ ID NO: 30828 - protein, 16 aa, Artificial Sequence
  Synthetic polypeptide
LQVSRGLPSHAELIRF

SEQ ID NO: 30829 - protein, 74 aa, Artificial Sequence; identical to SEQ ID NO: 9619
  Synthetic polypeptide

SEQ ID NO: 30830 - protein, 32 aa, Artificial Sequence
  Synthetic polypeptide
TLEVEGKKKEMRKMIQTMTQRRIKTQQSASSS

SEQ ID NO: 30831 - protein, 42 aa, Artificial Sequence
  Synthetic polypeptide
PGMVAHTCNLSTLGGRGRRIARAQEFETSLGNMFRSIPGGTE

SEQ ID NO: 30832 - protein, 14 aa, Artificial Sequence
  Synthetic polypeptide
LLITAEDQSMWIQS

SEQ ID NO: 30833 - protein, 338 aa, Artificial Sequence; identical to SEQ ID NO: 30569
  Synthetic polypeptide

SEQ ID NO: 30834 - protein, 61 aa, Artificial Sequence
  Synthetic polypeptide
KLRKCVTRNSLCKKCKRKFFKLSKMIPRNLDLLEGMESTQMPKCLCPSTDFGHQKEILQHL

SEQ ID NO: 30835 - protein, 314 aa, Artificial Sequence; identical to SEQ ID NO: 30571
  Synthetic polypeptide

SEQ ID NO: 30836 - protein, 46 aa, Artificial Sequence
  Synthetic polypeptide
RLKMGETLKDKVMGLVIPDVPKSEEGSKYTHCGQCEECSPKYISSC

SEQ ID NO: 30837 - protein, 87 aa, Artificial Sequence
  Synthetic polypeptide
MASAWEGGAWRRRRGEERGVGVVGRSVASAWGATTPATRWWWMGKSTTSTCCPAASSTPRPCPSLATGWSSTCQACLRKQRRMKRKA

SEQ ID NO: 30838 - protein, 50 aa, Artificial Sequence
  Synthetic polypeptide
MAVSYEVTHRLTMGSTGCDRPLDKGLSGWDGSALTMVTQTMHRSSRAESP

SEQ ID NO: 30839 - protein, 75 aa, Artificial Sequence
  Synthetic polypeptide
MLDNLMYDYELNWVRQAPGKGLEWVANIKQDGSEKYYVDSVKGRFTISRDNAKNSLYLQMNSLRAEDTAVYYCAR

SEQ ID NO: 30840 - protein, 605 aa, Artificial Sequence
  Synthetic polypeptide
MVILESMVSLTQELCPVAMRVAEGHNKMLSNVAERVTVPRNFIRGALLEQAGQDIQNKLDEVKLSVVTYLTSSIVDEILQELYHSHKSLARHLTQLRTLSDPPGCPGQGQDLSSRGRGRNHDHEETTDDELGTNIDTMAIKKQKRCRKIRPVSAFISGSPQDMESQLGNLGIPPGWFSGLGGSQPTASGSWEGLSELPTHGYKLRHQTQGRPRPPRTTPPGPGRPSMPAPGTRQENGMATRLDEGLEDFFSRRVLEESSSYPRTLRTVRPGLSEAPLPPLQKKRRRGLFHFRRPRSFKGDRGPGSPTTGLLLPPPPPPPPTQESPPSPDPPSLGNNSSPCWSPEEESSLLPGFGGGRGPSFRRKMGTEGSEPGEGGPAPGTAQQPRVHGVALPGLERAKGWSFDGKREGPGPDQEGSTQAWQKRRSSDDAGPGSWKPPPPPQSTKPSFSAMRRAEATWHIAEESAPNHSCQSPSPASQDGEEEKEGTLFPERTLPARNAKLQDPALAPWPPKPVAVPRGRQPPQEPGVREEAEAGDAAPGVNKPRLRLSSQQDQEEPEVQGPPDPGRRTAPLKPKRTRRAQSCDKLEPDRRRPPDPTGTSEPGTD

SEQ ID NO: 30841 - protein, 57 aa, Artificial Sequence
  Synthetic polypeptide
DQEFKTSLGNMLTADPRYRGHAMRQLTGNTSMAMRFLWTCCVKELPIFLRSTHRMLK

SEQ ID NO: 30842 - protein, 30 aa, Artificial Sequence
  Synthetic polypeptide
LLILSKVNGYPNYLIRKFMFGFPENWKEHI

SEQ ID NO: 30843 - protein, 110 aa, Artificial Sequence; identical to SEQ ID NO: 11150
  Synthetic polypeptide

SEQ ID NO: 30844 - protein, 31 aa, Artificial Sequence; identical to SEQ ID NO: 30573
  Synthetic polypeptide

SEQ ID NO: 30845 - protein, 778 aa, Artificial Sequence
  Synthetic polypeptide
GQEFKTSLAKMVKPHIYQKYKKLDGHAGDLDIEDDMKAQMNCFYLKALDGFVMVLTDDGDMIYISDNVNKYMGLTQFELTGHSVFDFTHPCDHEEMREMLTHRNGLVKKGKEQNTQRSFFLRMKCTLTSRGRTMNIKSATWKVLHCTGHIHVYDTNSNQPQCGYKKPPMTCLVLICEPIPHPSNIEIPLDSKTFLSRHSLDMKFSYCDERITELMGYEPEELLGRSIYEYYHALDSDHLTKTHHDMFTKGQVTTGQYRMLAKRGGYVWVETQATVIYNTKNSQPQCIVCVNYVVSGIIQHDLIFSLQQTECVLKPVESSDMKMTQLFTKVESEDTSSLFDKLKKEPDALTLLAPAAGDTIISLDFGSNDTETDDQQLEEVPLYNDVMLPSPNEKLQNINLAMSPLPTAETPKPLRSSADPALNQEVALKLEPNPESLELSFTMPQIQDQTPSPSDGSTRQSSPEPNSPSEYCFYVDSDMVNEFKLELVEKLFAEDTEAKNPFSTQDTDLDLEMLAPYIPMDDDFQLRSFDQLSPLESSSASPESASPQSTVTVFQQTQIQEPTANATTTTATTDELKTVTKDRMEDIKILIASPSPTHIHKETTSATSSPYRDTQSRTASPNRAGKGVIEQTEKSHPRSPNVLSVALSQRTTVPEEELNPKILALQNAQRKRKMEHDGSLFQAVGIGTLLQQPDDHAATTSLSWKRVKGCKSSEQNGMEQKTIILIPSDLACRLLGQSMDESGLPQLTSYDCEVNAPIQGSRNLLQGEELLRALDQVN

SEQ ID NO: 30846 - protein, 23 aa, Artificial Sequence
  Synthetic polypeptide
MVAGPTYLGDLCPPKWSNCSSYQ

SEQ ID NO: 30847 - protein, 341 aa, Artificial Sequence; identical to SEQ ID NO: 30574
  Synthetic polypeptide

SEQ ID NO: 30848 - protein, 57 aa, Artificial Sequence
  Synthetic polypeptide
IVATETTKPKTRTISPFTGKFQGPANQKTSSTGSSLLPITWGPPSCYQNGTLPKTSE

SEQ ID NO: 30849 - protein, 279 aa, Artificial Sequence
  Synthetic polypeptide
QQGSRVSTEEEKLIQQELSSLKATVSAPTTTLKMMKECMVRLIYCEMLGYDASFGYIHAIKLAQQGNLLEKRVGYLAVSLFLHESHELLLLLVNTVVKDLQSTNLVEVCMALTVVSQIFPCEMIPAVLPLIEDKLQHSKEIVRRKAVLALYKFHLIAPNQVQHIHIKFRKALCDRDVGVMAASLHIYLRMIKENSSGYKDLTGSFVTILKQVVGGKLPVEFNYHSVPAPWLQIQLLRILGLLGKDDQRSSVLKRSLKNCFIGLEYYNSTANKISFKQDK

SEQ ID NO: 30850 - protein, 45 aa, Artificial Sequence
  Synthetic polypeptide
SFLIWEGGLRMPILTTTQSYWRFQKTQSLGVDEVTIVNILTNRSN

SEQ ID NO: 30851 - protein, 39 aa, Artificial Sequence
  Synthetic polypeptide
GQDFKTSLGNMINDKERVAAAMENPNLREIVEQCVLEPD

SEQ ID NO: 30852 - protein, 22 aa, Artificial Sequence
  Synthetic polypeptide
RQRIFTYQICKATNKCTERQLL

SEQ ID NO: 30853 - protein, 30 aa, Artificial Sequence
  Synthetic polypeptide
AGGSGSVVIWTVPTGSWQKSARWPRCMRRS

SEQ ID NO: 30854 - protein, 36 aa, Artificial Sequence; identical to SEQ ID NO: 30581
  Synthetic polypeptide

SEQ ID NO: 30855 - protein, 54 aa, Artificial Sequence
  Synthetic polypeptide
PDQWLTPVIPTLSEAEVGTLLDTRNLEASWATRDAIEKLFPDAIRLRFEDIQQN

SEQ ID NO: 30856 - protein, 100 aa, Artificial Sequence
  Synthetic polypeptide
ITLGKLLPPCQPGSSLSSKVLEDDVSAVEFRQTGYMLRCSLSHAITLAQPYCSGEMCPGTSELKTPRNFIRMEMGVRMWGFITSPKESTDSACPSLVCTK

SEQ ID NO: 30857 - protein, 54 aa, Artificial Sequence
  Synthetic polypeptide
GRSQDGRIGTAPVYSSQRERRRRRVISAFPSEVPGSSHSGVPDSGRRPCSGQWP

SEQ ID NO: 30858 - protein, 23 aa, Artificial Sequence
  Synthetic polypeptide
GQEFETSLANMETPGRFTAEADQ

SEQ ID NO: 30859 - protein, 37 aa, Artificial Sequence
  Synthetic polypeptide
PGVVAYACSPKPLRRLRQEDPLNLTCPSCGITFAPKS

SEQ ID NO: 30860 - protein, 38 aa, Artificial Sequence; identical to SEQ ID NO: 30593
  Synthetic polypeptide

SEQ ID NO: 30861 - protein, 378 aa, Artificial Sequence
  Synthetic polypeptide
ATVWLGSGDEKKMERVSEPCPGSKKQLKFEELQCDVSMEEDSRQEWTFTLYDFDNNGKVTREDITSLLHTIYEVVDSSVNHSPTSSKMLRVKLTVAPDGSQSKRSVLVNQADLQSARPRAETKPTEDLRSWEKKQRAPLRFQGDSRLEQSGCYHHCVDENIERRNHYLDLAGIENYTSQFGPGSPSVAQKSELPPRTSNPTRSRSHEPEAIHIPHRKPQGVDPASFHFLDTPIAKVSELQQRLRGTQDGSKHFVRSPKAQGKSVGVGHVARGARNKPPLGPAIPAVSPSAHLAASPALLPSLAPLGHKKHKHRAKESQQGCRGLQAPLASGGPVLGREHLRELPALVVYESQAGQPVQRHEHHHHHEHHHHYHHFYQT

SEQ ID NO: 30862 - protein, 28 aa, Artificial Sequence
  Synthetic polypeptide
WQIYSGPLPTSPGAACLPCFSCGAKVFR

SEQ ID NO: 30863 - protein, 345 aa, Artificial Sequence
  Synthetic polypeptide
SQGSGLNFIDLMVRQGNIDNPPKTPLVPGFECSGIVEALGDSVKGYEIGDRVMAFVNYNAWAEVVCTPVEFVYKIPDDMSFSEAAAFPMNFVTAYVMLFEVANLREGMSVLVHSAGGGVGQAVAQLCSTVPNVTVFGTASTFKHEAIKDSVTHLFDRNADYVQEVKRISAEGVDIVLDCLCGDNTGKGLSLLKPLGTYILYGSSNMVTGETKSFFSFAKSWWQVEKVNPIKLYEENKVIAGFSLLNLLFKQGRAGLIRGVVEKLIGLYNQKKIKPVVDSLWALEEVKEAMQRIHDRGNIGKLILDVEKTPTPLMANDSTETSEAGEEEEDHEGDSENKERMPFIQ

SEQ ID NO: 30864 - protein, 28 aa, Artificial Sequence
  Synthetic polypeptide
MLLTTFVIHGRRRSLQTKADQQVKQQEI

SEQ ID NO: 30865 - protein, 17 aa, Artificial Sequence
  Synthetic polypeptide
WRELLHGTEGGEHRAGV

SEQ ID NO: 30866 - protein, 117 aa, Artificial Sequence; identical to SEQ ID NO: 30597
  Synthetic polypeptide

SEQ ID NO: 30867 - protein, 24 aa, Artificial Sequence
  Synthetic polypeptide
MGAVTHIWNPRTLGGQDPDHRHHS

SEQ ID NO: 30868 - protein, 49 aa, Artificial Sequence
  Synthetic polypeptide
VQEFETSLGNIQMSTKIKICKVWWHAPVVPTAREAEAGESLKPGRWRLQ

SEQ ID NO: 30869 - protein, 18 aa, Artificial Sequence
  Synthetic polypeptide
LLSSLFSEPTCLILVSPQ

SEQ ID NO: 30870 - protein, 22 aa, Artificial Sequence
  Synthetic polypeptide
IQEAEVAVKQMKLKDSRIKLMS

SEQ ID NO: 30871 - protein, 18 aa, Artificial Sequence
  Synthetic polypeptide
MGGATSPLLSSAKSGSHG

SEQ ID NO: 30872 - protein, 605 aa, Artificial Sequence
  Synthetic polypeptide
MVWVGTIGSGPKGRNLCATFQNTETFEFQDEVGALLLSVCQTVSQGILCFLPSYKLLEKLKERWLSTGLWHNLELVKTVIVEPQGGEKTNFDELLQVYYDAIKYKGEKDGALLVAVCRGKVSEGLDFSDDNARAVITIGIPFPNVKDLQVELKRQYNDHHSKLRGLLPGRQWYEIQAYRALNQALGRCIRHRNDWGALILVDDRFRNNPSRYISGLSKWVRQQIQHHSTFESALESLAEFSKKHQKVLNVSIKDRTNIQDNESTLEVTSLKYSTSPYLLEAASHLSPENFVEDEAKICVQELQCPKIITKNSPLPSSIISRKEKNDPVFLEEAGKAEKIVISRSTSPTFNKQTKRVSWSSFNSLGQYFTGKIPKATPELGSSENSASSPPRFKTEKMESKTVLPFTDKCESSNLTVNTSFGSCPQSETIISSLKIDATLTRKNHSEHPLCSEEALDPDIELSLVSEEDKQSTSNRDFETEAEDESIYFTPELYDPEDTDEEKNDLAETDRGNRLANNSDCILAKDLFEIRTIKEVDSAREVKAEDCIDTKLNGILHIEESKIDDIDGNVKTTWINELELGKTHEIEIKNFKPSPSKNKGMFPGFK

SEQ ID NO: 30873 - protein, 12 aa, Artificial Sequence
  Synthetic polypeptide
IPTVTPGAASSC

SEQ ID NO: 30874 - protein, 55 aa, Artificial Sequence
  Synthetic polypeptide
NLPLTLVPARKLAPALLSAMIFAVLWSTRGAMNLLLFLVRVRIRDPTLISSPLYC

SEQ ID NO: 30875 - protein, 44 aa, Artificial Sequence
  Synthetic polypeptide
SQLLRRLRQENHLNPGGRGYSETRLHHWTPAWAAEKQRLPRGHP

SEQ ID NO: 30876 - protein, 51 aa, Artificial Sequence
  Synthetic polypeptide
TQEAEVANAASKLLGQNWVQNAFDGSCNFFRWLEHLRLLRVIGKTTELATF

SEQ ID NO: 30877 - protein, 87 aa, Artificial Sequence
  Synthetic polypeptide
AHLNERNTLQEENKKLSEQLQQKIENDQQHQAAELECEEDVIPDSPITAFSFSGVNRLRRKENPHVRYIEQTHTKLEHSVCANEMRK

SEQ ID NO: 30878 - protein, 1557 aa, Artificial Sequence; identical to SEQ ID NO: 30615
  Synthetic polypeptide

SEQ ID NO: 30879 - protein, 189 aa, Artificial Sequence
  Synthetic polypeptide
MGAWLTPDTGVGKSSIVCRFVQDHFDHNISPTIGASFMTKTVPCGNELHKFLIWDTAGQERFHSLAPMYYRGSAAAVIVYDITKQDSFYTLKKWVKELKEHGPENIVMAIAGNKCDLSDIREVPLKDAKEYAESIGAIVVETSAKNAINIEELFQGISRQIPPLDPHENGNNGTIKVEKPTMQASRRCC

SEQ ID NO: 30880 - protein, 104 aa, Artificial Sequence
  Synthetic polypeptide
GNLQICCKMNLDVLSEMGHSCKDNTDSVVFEDVAVNFTQEEWALLGPSQKKLYRDVMQETFVNLASIGENWEEKNIEDHKNQGRKLRDGVLPCCPDWSQTPELK

SEQ ID NO: 30881 - protein, 231 aa, Artificial Sequence
  Synthetic polypeptide
GWARWLTPVIPALWEAKASGSLEGPFVTWRSMSVLPAHAAREVPVWMGKMASAASARLAPCPHSASPRAIPVPMSPAVTASAMMHLAGSAVCVSLAGVAPAAARAWPETPVSPSRAGPVGHAAAMEWVSTAPARLVSRDVSVNSSPPAPRTPVSMGAAASLPLASCLSAPAPRAGKAHDASRMWTSVLAPHPVALMVSAPTWQGVSAAPAMEGTLALPAIRTSMTVTPTHA

SEQ ID NO: 30882 - protein, 49 aa, Artificial Sequence
  Synthetic polypeptide
GAPLPGQPPRPGGRWGGQAPPGQPPRPGGRRTTMTRTKPLPPQLSTSGA

SEQ ID NO: 30883 - protein, 32 aa, Artificial Sequence
  Synthetic polypeptide
GRRRRRWPEEARAAAVAAKAEAVSPAKSTLAH

SEQ ID NO: 30884 - protein, 42 aa, Artificial Sequence
  Synthetic polypeptide
TELNIVPVPREIWGRLHGTPGTEARGHAVWSRGHTGGPCGQG

SEQ ID NO: 30885 - protein, 37 aa, Artificial Sequence
  Synthetic polypeptide
TAELPKPSISSNNSNPKEDKDAVAFTCEPEIHSTTCL

SEQ ID NO: 30886 - protein, 330 aa, Artificial Sequence; identical to SEQ ID NO: 30622
  Synthetic polypeptide

SEQ ID NO: 30887 - protein, 40 aa, Artificial Sequence
  Synthetic polypeptide
SQLLGRLRQEQLLEPRMQRKHSLGLGHPRSLRGPHQPTPS

SEQ ID NO: 30888 - protein, 13 aa, Artificial Sequence
  Synthetic polypeptide
MSLCILSMKSTMG

SEQ ID NO: 30889 - protein, 18 aa, Artificial Sequence
  Synthetic polypeptide
AWEAEIMVKYLLFMWEIK

SEQ ID NO: 30890 - protein, 203 aa, Artificial Sequence
  Synthetic polypeptide
MVLLVRMENEVALEDLALRVLLERMVKLDLRDPQGLLGLVVTKETQDPLVHKDYKACLVQVVLQEKMENLGNQVQRVMPVHLELQEARVMLVPLVNVDLLDWQGPQDLEVELVPLVPKEERVLLVLLGHLVLLVLLVCKECLEKEEVLEVLVQRVTRVNQAVQVLMVSQGKMAQGVLLVLLVLLAQLASLEIRVKVVPPDFQV

SEQ ID NO: 30891 - protein, 25 aa, Artificial Sequence
  Synthetic polypeptide
MGTVADTCDPSTLGGGVCDTAYRCR

SEQ ID NO: 30892 - protein, 22 aa, Artificial Sequence
  Synthetic polypeptide
MGAVTHTCNPSTLEGRDLPMMG

SEQ ID NO: 30893 - protein, 20 aa, Artificial Sequence
  Synthetic polypeptide
PPWLLCPMDRQSLSEELKCT

SEQ ID NO: 30894 - protein, 43 aa, Artificial Sequence
  Synthetic polypeptide
FLLIHSFLPPQFWLPAANCGLKIDMISCVWKDWFEDFRSSKKG

SEQ ID NO: 30895 - protein, 78 aa, Artificial Sequence
  Synthetic polypeptide
MAQWLMPVIPALWEAQIHFILLFSRQGKLRLQKWYITLPDKERKKITREIVQIILSRGHRTSSFVDWKELKLVYKRCL

SEQ ID NO: 30896 - protein, 1597 aa, Artificial Sequence
  Synthetic polypeptide
KARKQQMLVCFVNLDVNKDECSTEHLQQKLVNVSPDLPKLISSMNVQQPKENEIVVLSGLASGNLQADFEVSQCPWLPDICLVQCARGNRPNSTNCIIFEINKFLIGLELVQERQLHLETNILKLEDDTNCSLSSIEEDFLTASEHLEEESEVDESRNDYENINVSANVLESKQLKGATQVEWNCNKEKWLYALEDKYINKYPTPLIKTERSPENLTKNTALQSLDPSAKPSQWKREAVGNGRQATHYYHSEAFKGQMEKSQALYIPKDAYFSMMDKDVPSACAVAEQRSNLNPGDHEDTRNALPPRQDGEVTTGKYATNLAESVLQDAFIRLSQSQSTLPQESAVSVSVGSSLLPSCYSTKDTVVSRSWNELPKIVVVQSPDGSDAAPQPGISSWPEMEVSVETSSILSGENSSRQPQSALEVALACAATVIGTISSPQATERLKMEQVVSNFPPGSSGALQTQAPQGLKEPSINEYSFPSALCGMTQVASAVAVCGLGEREEVTCSVAPSGSLPPAAEASEAMPPLCGLASMELGKEAIAKGLLKEAALVLTRPNTYSSIGDFLDSMNRRIMETASKSQTLCSENVVRNELAHTLSNVILRHSIDEVHHKNMIIDPNDNRHSSEILDTLMESTNQLLLDVICFTFKKMSHIVRLGECPAVLSKETIRRRETEPSCQPSDPGASQAWTKATESSSSSPLSNSHNTSLVINNLVDGMYSKQDKGGVRPGLFKNPTLQSQLSRSHRVPDSSTATTSSKEIYLKGIAGEDTKSPHHSENECRASSEGQRSPTVSQSRSGSQEAEESIHPNTQEKYNCATSRINEVQVNLSLLGDDLLLPAQSTLQTKHPDIYCITDFAEELADTVVSMATEIAAICLDNSSGKQPWFCAWKRGSEFLMTPNVPCRSLKRKKESQGSGTAVRKHKPPRLSEIKRKTDEHPELKEKLMNRVVDESMNLEDVPDSVNLFANEVAAKIMNLTEFSMVDGMWQAQGYPRNRLLSGDRWSRLKASSCESIPEEDSEARAYVNSLGLMSTLSQPVSRASSVSKQSSCESITDEFSRFMVNQMENEGRGFELLLDYYAGKNASSILNSAMQQACRKSDHLSVRPSCPSKQSSTESITEEFYRYMLRDIERDSRESASSRRSSQDWTAGLLSPSLRSPVCHRQSSMPDSRSPCSRLTVNVPIKANSLDGFAQNCPQDFLSVQPVSSASSSGLCKSDSCLYRRGGTDHITNMLIHETWASSIEALMRKNKIIVDDAEEADTEPVSGGSPSQAEKCANRLAASRMCSGPTLLVQESLDCPRKDSVTECKQPPVSSLSKTASLTNHSPLDSKKETSSCQDPVPINHKRRSLCSREVPLIQIETDQREACAGEPEPFLSKSSLLEEAEGHSNDKNIPDVVRGGDTAVSACQIHSDSLDTRDVPEAEASTEARAPDEAPNPPSSSEESTGSWTQLANEEDNPDDTSSFLQLSERSMSELVEEKKILKGQSESTEAPASGPPTGTASPQRSLLVINFDLEPECPDAELRATLQWIAASELGIPTIYFKKSQENRIEKFLDVVQLVHRKSWKVGDIFHAVVQYCKMHEEQKDGRLSLFDWLLELG

SEQ ID NO: 30897 - protein, 14 aa, Artificial Sequence
  Synthetic polypeptide
CNPSTLGDQAEKLG

SEQ ID NO: 30898 - protein, 108 aa, Artificial Sequence
  Synthetic polypeptide
IVESGDTPKDPAVISKSPSMAQDSGASELLPNGDLEKRSEPQPEEGSPAGGQKGGAPAEGEGAAETLPEASRAVENGCCTPKEGRGAPAEAGESSAPGAASSGPTSIP

SEQ ID NO: 30899 - protein, 50 aa, Artificial Sequence
  Synthetic polypeptide
ASKPFPWVFGSSFLKALVNLSFVTGVSSMTFMMGNICRSPIAEAVFRKLV

SEQ ID NO: 30900 - protein, 150 aa, Artificial Sequence; identical to SEQ ID NO: 30637
  Synthetic polypeptide

SEQ ID NO: 30901 - protein, 32 aa, Artificial Sequence
  Synthetic polypeptide
ICHFLSVTGSLLRNYQNIEITNLLSFLKRKTQ

SEQ ID NO: 30902 - protein, 50 aa, Artificial Sequence
  Synthetic polypeptide
SPVTMEQLICKVGSHQGSAAVDLGQISLSPSAACSLKILQLITANSIIVT

SEQ ID NO: 30903 - protein, 60 aa, Artificial Sequence
  Synthetic polypeptide
MKHLEDYMEHTPPPRRPGPSSRRTICAVPSASAWPRPTCGCWWTASFATPPRTCGSSATP

SEQ ID NO: 30904 - protein, 57 aa, Artificial Sequence; identical to SEQ ID NO: 30647
  Synthetic polypeptide

SEQ ID NO: 30905 - protein, 48 aa, Artificial Sequence; identical to SEQ ID NO: 30649
  Synthetic polypeptide

SEQ ID NO: 30906 - protein, 13 aa, Artificial Sequence
  Synthetic polypeptide
MLSTSWTLPRKLH

SEQ ID NO: 30907 - protein, 429 aa, Artificial Sequence; identical to SEQ ID NO: 30655
  Synthetic polypeptide

SEQ ID NO: 30908 - protein, 69 aa, Artificial Sequence
  Synthetic polypeptide
MGTVAHACNTSTLGGQEHCEGLRCTLWDDPPGGHEVGTYRHQVPPAGISEQTSELGIGTVPAHGAGHGH

SEQ ID NO: 30909 - protein, 51 aa, Artificial Sequence
  Synthetic polypeptide
VKLAKHRKTNYAASSYLSLTPEQWKSHRSYSCQVTHEGSTVEKTVAPTECS

SEQ ID NO: 30910 - protein, 75 aa, Artificial Sequence; identical to SEQ ID NO: 30667
  Synthetic polypeptide

SEQ ID NO: 30911 - protein, 10 aa, Artificial Sequence
  Synthetic polypeptide
MTKLLSPIRM

SEQ ID NO: 30912 - protein, 178 aa, Artificial Sequence; identical to SEQ ID NO: 30673
  Synthetic polypeptide

SEQ ID NO: 30913 - protein, 572 aa, Artificial Sequence
  Synthetic polypeptide
MQLDQICISFDEGKTTMNFIEAALLIQGSACVYSKKVEYLYSLVYQALDFISGKRRAKQLSSVQEDRANGVASSGVPQEAENEFLSLDDFPDSRTNVDLKNDQTPSEVLIIPLLPMALVAPDEMEKNNNPLYSRQGEVLASRKDFRMNTCVPHPRGAFMLEPEGMSPMEPAGVSPMPGTQKDTGRTEEQPMEVSVCRSPVPALGFSQEPGPSPEGPMPLGGGEDEDAEEAVELPEASAPKAALEPKESRSPQQSAALPRRYMLREREGAPEPASCVKETPDPWQSLDPFDSLESKPFKKGRPYSVPPCVEEALGQKRKRKGAAKLQDFHQWYLAAYADHADSRRLRRKGPSFADMEVLYWTHVKEQLETLRKLQRREVAEQWLRPAEEDHLEDSLEDLGAAADDFLEPEEYMEPEGADPREAADLDAVPMSLSYEELVRRNVELFIATSQKFVQETELSQRIRDWEDTVQPLLQEQEQHVPFDIHTYGDQLVSRFPQLNEWCPFAELVAGQPAFEVCRSMLASLQLANDYTVEITQQPGLEMAVDTMSLRLLTHQRAHKRFQTYAAPSMAQP

SEQ ID NO: 30914 - protein, 56 aa, Artificial Sequence; identical to SEQ ID NO: 30680
  Synthetic polypeptide

SEQ ID NO: 30915 - protein, 26 aa, Artificial Sequence
  Synthetic polypeptide
MLPPFVLAVTMGLSVVKVAKVSSKGV

SEQ ID NO: 30916 - protein, 65 aa, Artificial Sequence
  Synthetic polypeptide
GWAQWLTPVIPALWEAEVDGSRGQEIKIILANTFSKKSDGHIKDQRLGGRAKSRSQNNSVCSKTI

SEQ ID NO: 30917 - protein, 56 aa, Artificial Sequence; identical to SEQ ID NO: 21470
  Synthetic polypeptide

SEQ ID NO: 30918 - protein, 153 aa, Artificial Sequence; identical to SEQ ID NO: 21474
  Synthetic polypeptide

SEQ ID NO: 30919 - protein, 45 aa, Artificial Sequence
  Synthetic polypeptide
MAVVAHACNLNSFGGQGPAWFLRYPNHRHRPDGEPLGGHHLLQGH

SEQ ID NO: 30920 - protein, 81 aa, Artificial Sequence
  Synthetic polypeptide
DLDRILKQKKVISGKTENLGSILSWWHNKWHNSMPPHHPLKRRRRRKLKSRTKRNLRKTRKLVLVLPRKIPTRKPNQSLTF

SEQ ID NO: 30921 - protein, 10 aa, Artificial Sequence
  Synthetic polypeptide
SQVMDVDTLY

SEQ ID NO: 30922 - protein, 34 aa, Artificial Sequence
  Synthetic polypeptide
LNEGASGLDGKPGSRGTDGPMGPHGPAGPKGERG

SEQ ID NO: 30923 - protein, 18 aa, Artificial Sequence
  Synthetic polypeptide
MLQPSQEVGTISKHLDWH

SEQ ID NO: 30924 - protein, 404 aa, Artificial Sequence
  Synthetic polypeptide
MDGQMMDTGVDKLVDGAGDFSEFFEWQKKMQAKDREEQLAASECRRLQGKLSHEEAVLARQSLMQENKQRVEQQKEQMAKLMLQRAERRLREDRSRKELVEQVIEGQKNAKAAQTKLAKGRQQTVQEAIEESRGLLQRRAQAAQEEQRRRCELISQLRALETQPTRKGKLVDLTQIPGYGLEGEMSIVELRERLALLKENQRRKEEEKRDQIIQGKHTKSQELQNMVEQISLCRAAMGRSAALRWEEKKALAAAPAAPSQDERVQQLRRRISERAAERSRQAALLHVSAPRTARPKPRVSPDWWEEPGRLKAGAGWGWRARRAGTGVPGRGWRGDRVRSAAGRYAAAGAGGGGGVPARADAFPGLQAQLEAQHWLELERSRERRLQALQQGGSGPGPARRLEAA

SEQ ID NO: 30925 - protein, 215 aa, Artificial Sequence
  Synthetic polypeptide
EQSKLSVLREAIALCHFFFNISGILLWYPIPFTRLPIRMAKGLGNISAKYRWFAVFYLIIFFFLIPLTVFGLSLAGWRVLVGVGVPVVFIIILVLCLRLLQSRCPRVLPKKLQNWNFLPLWMRSLKPWDAVVSKFTGCFQMRCCCCCRVCCRACCLLCDCPKCCRCSKCCEDLEEAQEGQDVPVKAPETFDNITISREAQGEVPASDSKTECTAL

SEQ ID NO: 30926 - protein, 23 aa, Artificial Sequence
  Synthetic polypeptide
KKPDAKEYIVPMLTGLQPIMIIQ

SEQ ID NO: 30927 - protein, 27 aa, Artificial Sequence
  Synthetic polypeptide
MYMAHGLTQSTKENVFLGRWAEAEGLA

SEQ ID NO: 30928 - protein, 60 aa, Artificial Sequence; identical to SEQ ID NO: 23593
  Synthetic polypeptide

SEQ ID NO: 30929 - protein, 16 aa, Artificial Sequence
  Synthetic polypeptide
SRKLYARLLINRMVTL

SEQ ID NO: 30930 - protein, 97 aa, Artificial Sequence; identical to SEQ ID NO: 30707
  Synthetic polypeptide

SEQ ID NO: 30931 - protein, 24 aa, Artificial Sequence
  Synthetic polypeptide
DKDAAALLLANEARTPGGLVGHKQ

SEQ ID NO: 30932 - protein, 10 aa, Artificial Sequence
  Synthetic polypeptide
GLFSQAEIRC

SEQ ID NO: 30933 - protein, 492 aa, Artificial Sequence
  Synthetic polypeptide
GQEFKTSLANMVGMFKVHPEIPESMSAEAKAFILKCFEPDPDKRACANDLLVDEFLKVSSKKKKTQPKLSALSAGSNEYLRSISLPVPVLVEDTSSSSEYGSVSPDTELKVDPFSFKTRAKSCGERDVKGIRTLFLGIPDENFEDHSAPPSPEEKDSGFFMLRKDSERRATLHRILTEDQDKIVRNLMESLAQGAEEPKLKWEHITTLIASLREFVRSTDRKIIATTLSKLKLELDFDSHGISQVQVVLFGFQDAVNKVLRNHNIKPHWMFALDSIIRKAVQTAITILVPELRPHFSLASESDTADQEDLDVEDDHEEQPSNQTVRRPQAVIEDAVATSGVSTLSSTVSHDSQSAHRSLNVQLGRMKIETNRLLEELVRKEKELQALLHRAIEEKDQEIKHLKLKSQPIEIPELPVFHLNSSGTNTEDSELTDWLRVNGADEDTISRFLAEDYTLLDVLYYVTRDDLKCLRLRGGMLCTLWKAIIDFRNKQT

SEQ ID NO: 30934 - protein, 15 aa, Artificial Sequence
  Synthetic polypeptide
MILSSIRKEDIHTTK

SEQ ID NO: 30935 - protein, 53 aa, Artificial Sequence
  Synthetic polypeptide
KFSEASVAMLPVQLWNRIIMPLPSRSNLRAVYWSCEFNHLNPTLLQDDYKKMY

SEQ ID NO: 30936 - protein, 1377 aa, Artificial Sequence; identical to SEQ ID NO: 30709
  Synthetic polypeptide

SEQ ID NO: 30937 - protein, 548 aa, Artificial Sequence; identical to SEQ ID NO: 30713
  Synthetic polypeptide

SEQ ID NO: 30938 - protein, 27 aa, Artificial Sequence
  Synthetic polypeptide
WARWLTLVIPALWEAKVGGSRVLGGDQ

SEQ ID NO: 30939 - protein, 42 aa, Artificial Sequence
  Synthetic polypeptide
AVAHAYNLSTLRGQVIGEIDEETDSALDLGNIRAEPLNSVAH

SEQ ID NO: 30940 - protein, 23 aa, Artificial Sequence
  Synthetic polypeptide
NTQLTMWLPQLIWTKRTSSLLPR

SEQ ID NO: 30941 - protein, 23 aa, Artificial Sequence
  Synthetic polypeptide
APVSDEKDTTEPKIPAYQIKTGH

SEQ ID NO: 30942 - protein, 99 aa, Artificial Sequence
  Synthetic polypeptide
FSPLFFILLTSALLVPETRKAFLAMIHSVSSMKSGSRRPNSCFKCSRSILKNKLVLTENLRRPFQLNNVLPRKLGVNFQRKMQNNSSMLLNSKAWFRNS

SEQ ID NO: 30943 - protein, 131 aa, Artificial Sequence
  Synthetic polypeptide
GHEFETSLANMVIQLLKAGKAKEVSYNALASHIISEDGDNPEVGEAREVFDLPVVKPSWVILSVQCGTLLPVNGFSPESCQIFFGITACLSQGVDTSWSSLLESSRALPGRGREGSLSSRSWEAQRSSAFF

SEQ ID NO: 30944 - protein, 28 aa, Artificial Sequence
  Synthetic polypeptide
QAWRLMPVIPAHWEAEVKKAQTPSPPAL

SEQ ID NO: 30945 - protein, 129 aa, Artificial Sequence
  Synthetic polypeptide
LSPLPSNSCVTWGGYRTCGTPRTNGYPWNRESRGTGNPRSYWSTWSTRARRTGLTWFQGRSRPNGTYRPSRTSGNWSTRSKGRARLNRAPRTTRSTRRRWSCREEGRSGASGSKRPRRTTWKRTAWPQG

SEQ ID NO: 30946 - protein, 447 aa, Artificial Sequence; identical to SEQ ID NO: 26803
  Synthetic polypeptide

SEQ ID NO: 30947 - protein, 13 aa, Artificial Sequence
  Synthetic polypeptide
AGFYEQMNGPVAG

SEQ ID NO: 30948 - protein, 63 aa, Artificial Sequence
  Synthetic polypeptide
WVQWLTPVISALWEAKASGSQGMFKISKFRKSFRVFERKHGCFSKECVSGVGRSAVCFHDFFT

SEQ ID NO: 30949 - protein, 25 aa, Artificial Sequence
  Synthetic polypeptide
VCSQHLKIKNLQLSAHLLTSSLKMN

SEQ ID NO: 30950 - protein, 62 aa, Artificial Sequence
  Synthetic polypeptide
VILVNLGSSAEWVFQRLLHSLGMTRTPSPATVAVRQLALRVCPAWSLATTCGPARMAAMSWA

SEQ ID NO: 30951 - protein, 236 aa, Artificial Sequence
  Synthetic polypeptide
MAHLLPNVSEETVSPTRARNMKDFENQITELKKENFNLKLRIYFLEERMQQEFHGPTEHIYKTNIELKVEVESLKRELQEREQLLIKASKAVESLAEAGGSEIQRVKEDARKKVQQVEDLLTKRILLLEKDVTAAQAELEKAFAGTETEKALRLRLESKLSEMKKMHEGDLAMALVLDEKDRLIEELKLSLKSKEALIQCLKEEKSQMACPDENVSSGELRGLCAAPREEKERETE

SEQ ID NO: 30952 - protein, 60 aa, Artificial Sequence
  Synthetic polypeptide
TWKAEVAASQDRTTALQPGHSDLVTARDTWKSSISPAWSCDGGSRDKALHPRRLGGGQIL

SEQ ID NO: 30953 - protein, 85 aa, Artificial Sequence; identical to SEQ ID NO: 30744
  Synthetic polypeptide

SEQ ID NO: 30954 - protein, 146 aa, Artificial Sequence
  Synthetic polypeptide
MNSLSIRGAQEEDPPDPQLMRLDNMLLAEGVSGPEKGGGSAAAAAAAAASGGSSDNSIEHSDYRAKLTQIRQIYHTELEKYEQACNEFTTHVMNLLREQSRTRPISPKEIERMVGIIHRKFSSIQMQLKQSTCEAVMILRSRFLDA

SEQ ID NO: 30955 - protein, 1300 aa, Artificial Sequence
  Synthetic polypeptide
LQFYGRHLENSSGYQEVEGVVWKQVSAERQETPMAADEGSAEKQAGEAHMAADGETNGSCENSDASSHANAAKHTQDSARVNPQDGTNTLTRIAENGVSERDSEAAKQNHVTADDFVQTSVIGSNGYILNKPALQAQPLRTTSTLASSLPGHAAKTLPGGAGKGRTPSAFPQTPAAPPATLGEGSADTEDRKLPAPGADVKVHRARKTMPKSVVGLHAASKDPREVREARDHKEPKEEINKNISDFGRQQLLPPFPSLHQSLPQNQCYMATTKSQTACLPFVLAAAVSRKKKRRMGTYSLVPKKKTKVLKQRTVIEMFKSITHSTVGSKGEKDLGASSLHVNGESLEMDSDEDDSEELEEDDGHGAEQAAAFPTEDSRTSKESMSEADRAQKMDGESEEEQESVDTGEEEEGGDESDLSSESSIKKKFLKRKGKTDSPWIKPARKRRRRSRKKPSGALGSESYKSSAGSAEQTAPGDSTGYMEVSLDSLDLRVKGILSSQAEGLANGPDVLETDGLQEVPLCSCRMETPKSREITTLANNQCMATESVDHELGRCTNSVVKYELMRPSNKAPLLVLCEDHRGRMVKHQCCPGCGYFCTAGNFMECQPESSISHRFHKDCASRVNNASYCPHCGEESSKAKEVTIAKADTTSTVTPVPGQEKGSALEGRADTTTGSAAGPPLSEDDKLQGAASHVPEGFDPTGPAGLGRPTPGLSQGPGKETLESALIALDSEKPKKLRFHPKQLYFSARQGELQKVLLMLVDGIDPNFKMEHQNKRSPLHAAAEAGHVDICHMLVQAGANIDTCSEDQRTPLMEAAENNHLEAVKYLIKAGALVDPKDAEGSTCLHLAAKKGHYEVVQYLLSNGQMDVNCQDDGGWTPMIWATEYKHVDLVKLLLSKGSDINIRDNEENICLHWAAFSGCVDIAEILLAAKCDLHAVNIHGDSPLHIAARENRYDCVVLFLSRDSDVTLKNKEGETPLQCASLNSQVWSALQMSKALQDSAPDRPSPVERIVSRDIARGYERIPIPCVNAVDSEPCPSNYKYVSQNCVTSPMNIDRNITHLQYCVCIDDCSSSNCMCGQLSMRCWYDKDGRLLPEFNMAEPPLIFECNHACSCWRNCRNRVVQNGLRARLQLYRTRDMGWGVRSLQDIPPGTFVCEYVGELISDSEADVREEDSYLFDLDNKDGEVYCIDARFYGNVSRFINHHCEPNLVPVRVFMAHQDLRFPRIAFFSTRLIEAGEQLGFDYGERFWDIKGKLFSCRCGSPKCRHSSAALAQRQASAAQEAQEDGLPDTSSAAAADPL

SEQ ID NO: 30956 - protein, 60 aa, Artificial Sequence
  Synthetic polypeptide
PGVVAHACNPSTLGGQGRRIACAREFETSLGLWQAMRARLPSYGPRLKREKHCDKVWNMT

SEQ ID NO: 30957 - protein, 149 aa, Artificial Sequence
  Synthetic polypeptide
MSDPVFLSLSLLVCETGDHEKRNGRVSLSDGSDSESSSASSPLHHEPPPPLLKTNNNQILEVKSPIKQSKSDKQIKNGECDKAYLDELVELHRRLMTLRERHILQQIVNLIEETGHFHITNTTFDFDLCSLDKTTVRKLQSYLETSGTS

SEQ ID NO: 30958 - protein, 53 aa, Artificial Sequence
  Synthetic polypeptide
SQLLWRLRWEDRLNLGDGGCYEPRLHHCTPAWLTERILNFLLTTPIHHLPSDS

SEQ ID NO: 30959 - protein, 405 aa, Artificial Sequence
  Synthetic polypeptide
SSGAQGEYAGLATIRAYLNQKGEGHRTVCLIPKSAHGTNPASAHMAGMKIQPVEVDKYGNIDAVHLKAMVDKHKENLAAIMITYPSTNGVFEENISDVCDLIHQHGGQVYLDGANMNAQVGICRPGDFGSDVSHLNLHKTFCIPHGGGGPGMGPIGVKKHLAPFLPNHPVISLKRNEDACPVGTVSAAPWGSSSILPISWAYIKMMGGKGLKQATETAILNANYMAKRLETHYRILFRGARGYVGHEFILDTRPFKKSANIEAVDVAKRLQDYGFHAPTMSWPVAGTLMVEPTESEDKAELDRFCDAMISIRQEIADIEEGRIDPRVNPLKMSPHSLTCVTSSHWDRPYSREVAAFPLPFVKPENKFWPTIARIDDIYGDQHLVCTCPPMEVYESPFSEQKRASS

SEQ ID NO: 30960 - protein, 25 aa, Artificial Sequence
  Synthetic polypeptide
AEIALLHSSLGNREKLVKKEPSVTG

SEQ ID NO: 30961 - protein, 979 aa, Artificial Sequence
  Synthetic polypeptide
LSLSEDTDNSSLSPPPAKLSVVSFAPSSNEVETTSLNDVTLSLLPSNETEKTKITIVKTFNASGVKPQRNICNLSSICNDSAFFRGEIMFQYDKESTVPQNQHITNGTLTGVLSLSELKRSELNKTLQTLSETYFIMCATAEAQSTLNCTFTIKLNNTMNACAVIAALERVKIRPMEHCCCSVRIPCPSSPEELEKLQCDLQDPIVCLADHPRGPPFSSSQSIPVVPRATVLSQVPKATSFAEPPDYSPVTHNVPSPIGEIQPLSPQPSAPIASSPAIDMPPQSETISSPMPQTHVSGTPPPVKASFSSPTVSAPANVNTTSAPPVQTDIVNTSSISDLENQVLQMEKALSLGSLEPNLAGEMINQVSRLLHSPPDMLAPLAQRLLKVVDDIGLQLNFSNTTISLTSPSLALAVIRVNASSFNTTTFVAQDPANLQVSLETQAPENSIGTITLPSSLMNNLPAHDMELASRVQFNFFETPALFQDPSLENLSLISYVISSSVANLTVRNLTRNVTVTLKHINPSQDELTVRCVFWDLGRNGGRGGWSDNGCSVKDRRLNETICTCSHLTSFGVLLDLSRTSVLPAQMMALTFITYIGCGLSSIFLSVTLVTYIAFEKIRRDYPSKILIQLCAALLLLNLVFLLDSWIALYKMQGLCISVAVFLHYFLLVSFTWMGLEAFHMYLALVKVFNTYIRKYILKFCIVGWGVPAVVVTIILTISPDNYGLGSYGKFPNGSPDDFCWINNNAVFYITVVGYFCVIFLLNVSMFIVVLVQLCRIKKKKQLGAQRKTSIQDLRSIAGLTFLLGITWGFAFFAWGPVNVTFMYLFAIFNTLQGFFIFIFYCVAKENVRKQWRRYLCCGKLRLAENSDWSKTATNGLKKQTVNQGVSSSSNSLQSSSNSTNSTTLLVNNDCSVHASGNGNASTERNGVSFSVQNGDVCLHDFTGKQHMFNEKEDSCNGKGRMALRRTSKRGSLHFIEQM

SEQ ID NO: 30962 - protein, 21 aa, Artificial Sequence
  Synthetic polypeptide
LQDSTGSWEKNWNSICSQSYN

SEQ ID NO: 30963 - protein, 94 aa, Artificial Sequence
  Synthetic polypeptide
SQHFGRTRQVDHLRSRVQDHPGQHGEAIGKMQQQGIPGGIFFHCERFDQPIGEDSLCSILEELWQDNDQLEQRQENQNNLLSHVKVLIKERGYE

SEQ ID NO: 30964 - protein, 17 aa, Artificial Sequence
  Synthetic polypeptide
MLLTHWLNLADHWRFHR

SEQ ID NO: 30965 - protein, 62 aa, Artificial Sequence; identical to SEQ ID NO: 77
  Synthetic polypeptide

SEQ ID NO: 30966 - protein, 193 aa, Artificial Sequence
  Synthetic polypeptide
MASGSKASVPADSFRTISPDRRGEKSASAVSGDTAAATTLKGTAIPVRSVVASPRPVKGKAGRETARLRLQRLPAAQAEDTGEAAAAAAEEPLLPVPEDEEEAQPLPPVCVSRMRGMWRDEKVSLYCDEVLQDCKAEDADEVMGKYLSEKLKLKDKWLGVWKTNPSVFFVKYEEASIPFVGILVEKEPGWINQ

SEQ ID NO: 30967 - protein, 74 aa, Artificial Sequence
  Synthetic polypeptide
MGFLQLVRLDSNSRPQAEDADEVMGKYLSEKLKLKDKWLGVWKTNPSVFFVKYEEASIPFVGILVEKEPGWINQ

SEQ ID NO: 30968 - protein, 100 aa, Artificial Sequence
  Synthetic polypeptide
MSQGLPAAGSVLQRSVAAPGNQPQPQPQQQSPEDDDRKVRRREKNRVAAQRSRKKQTQKADKLHELMERTIFLITQIRSLGFILSHSFSLRPHAYTCIIL

SEQ ID NO: 30969 - protein, 67 aa, Artificial Sequence; identical to SEQ ID NO: 258
  Synthetic polypeptide

SEQ ID NO: 30970 - protein, 29 aa, Artificial Sequence
  Synthetic polypeptide
LLDASQFGRMITRTDGSLEPKSSRQAWAT

SEQ ID NO: 30971 - protein, 132 aa, Artificial Sequence
  Synthetic polypeptide
MAAAAQLSLTQLSSGNPVYEKYYRQEQSSSPAMEQSWMENDFDKLTELGFRRSVITNFSELKEDVRTHCKEAKILEKRLDEWLIRINSVEKTLHDLMELKTMARELRDASTSFSSQFDQVEEKVSVVEARMK

SEQ ID NO: 30972 - protein, 20 aa, Artificial Sequence
  Synthetic polypeptide
MIVMNDQMDSSLKAGSMPCS

SEQ ID NO: 30973 - protein, 49 aa, Artificial Sequence
  Synthetic polypeptide
MEAYTPKLTQLLKTLRQENHLNLEGRGYSELTPRHCTPAWATRAKLHLK

SEQ ID NO: 30974 - protein, 512 aa, Artificial Sequence
  Synthetic polypeptide
MSLICSISNEVPEHPCVSPVSNHVYERRLIEKYIAENGTDPINNQPLSEEQLIDIKVAHPIRPKPPSATSIPAILKALQDEWDAVMLHSFTLRQQLQTTRQELSHALYQHDAACRVIARLTKEVTAAREALATLKPQAGLIVPQAVPSSQPSVVGAGEPMDLGELVGMTPEIIQKLQDKATVLTTERKKRGKTVPEELVKPEELSKYRQVASHVGLHSASIPGILALDLCPSDTNKILTGGADKNVVVFDKSSEQILATLKGHTKKVTSVVFHPSQDLVFSASPDATIRIWSVPNASCVQVVRAHESAVTGLSLHATGDYLLSSSDDQYWAFSDIQTGRVLTKVTDETSGCSLTCAQFHPDGLIFGTGTMDSQIKIWDLKERTNVANFPGHSGPITSIAFSENGYYLATAADDSSVKLWDLRKLKNFKTLQLDNNFEVKSLIFDQSGTYLALGGTDVQIYICKQWTEILHFTDFPISLDTTILKLGQLITVLWPLGVQVKESVPCLLLKIQS

SEQ ID NO: 30975 - protein, 127 aa, Artificial Sequence
  Synthetic polypeptide
YWAFSDIQTGRVLTKVTDETSGCSLTCAQFHPDGLIFGTGTMDSQIKIWDLKVKSLIFDQSGTYLALGGTDVQIYICKQWTEILHFTDFPISLDTTILKLGQLITVLWPLGVQVKESVPCLLLKIQS

SEQ ID NO: 30976 - protein, 331 aa, Artificial Sequence
  Synthetic polypeptide
MEDSDSAAKQLGLAEAAAVAAAAAVAAAAAAAAGGEAEEPVLSRDEDSEEDADSEAERETPRVTAVAVMAAEPGHMDMGAEALPGPDEAAAAAAFAEVTTVTVANVGAAADNVFTTSVANAASISGHVLSGRTALQIGDSLNTEKATLIVVHTDGSIVETTGLKGPAAPLTPGPQSPPTPLAPGQEKGGTKYNWDPSVYDSELPVRCRNISGTLYKNRLGSGGRGRCIKQGENWYSPTEFEAMAGRASSKDWKRSIRYAGRPLQCLIQDGILNPHAASCTCAACCDDMTLLLRRLTQNHLNLGGGGCSKPRWRHCTPAWAARVKLRLKKEK

SEQ ID NO: 30977 - protein, 489 aa, Artificial Sequence
  Synthetic polypeptide
MSRQSSVSFRSGGSRSFSTASAITPSVSRTSFTSVSRSGGGGGGGFGRVSLAGACGVGGYGSRSLYNLGGSKRISISTSGGSFRNRFGAGAGGGYGFGGGAGSGFGFGGGAGGGFGLGGGAGFGGGFGGPGFPVCPPGGIQEVTVNQSLLTPLNLQIDPSIQRVRTEEREQIKTLNNKFASFIDKVRFLEQQNKVLDTKWTLLQEQGTKTVRQNLEPLFEQYINNLRRQLDSIVGERGRLDSELRNMQDLVEDFKNKYEDEINKRTTAENEFVMLKKDVDAAYMNKVELEAKVDALMDEINFMKMFFDAELSQMQTHVSDTSVVLSMDNNRNLDLDSIIAEVKAQYEEIANRSRTEAESWYQTKYEELQQTAGRHGDDLRNTKHEISEMNRMIQRLRAEIDNVKKQCANLQNAIADAEQRGELALKDARNKLAELEEALQKAKQDMARLLREYQELMNTKLALDVEIATYRKLLEGEECRNLASKKRLE

SEQ ID NO: 30978 - protein, 115 aa, Artificial Sequence
  Synthetic polypeptide
MEEMRDPSKIKWGDAGAEYVVESTGVFTTMEKAGAHLQGGAKRVIISAPSADAPMFVMGVNHEKYDNSLKIISNASCTTNCLAPLAKVIHDNFGIVEGLMTVTPKCTINTRQFHY

SEQ ID NO: 30979 - protein, 190 aa, Artificial Sequence
  Synthetic polypeptide
MGKVKVGVNGFGRIGRLVTRAAFNSGKVDIVAINDPFIDLNYMVYMFQYDSTHGKFHGTVKAENGKLVINGNPITIFQERDPSKIKWGDAGAEYVVESTGVFTTMEKAGAHLQGGAKRVIISAPSADAPMFVMGVNHEKYDNSLKIISNASCTTNCLAPLAKVIHDNFGIVEGLMTVTPKCTINTRQFHY

SEQ ID NO: 30980 - protein, 148 aa, Artificial Sequence
  Synthetic polypeptide
MVYMFQYDSTHGKFHGTVKAENGKLVINGNPITIFQERDPSKIKWGDAGAEYVVESTGVFTTMEKAGAHLQGGAKRVIISAPSADAPMFVMGVNHEKYDNSLKIISNASCTTNCLAPLAKVIHDNFGIVEGLMTVTPKCTINTRQFHY

SEQ ID NO: 30981 - protein, 490 aa, Artificial Sequence
  Synthetic polypeptide
MDAQTWPVGFRCLLLLALVGSARSEGVQTCEEVRKLFQWRLLGAVRGLPDSPRAGPDLQVCISKKPTCCTRKMEERYQIAARQDMQQFLQTSSSTLKFLISRNAAAFQETLETLIKQAENYTSILFCSTYRNMALEAAASVQEFFTDVGLYLFGADVNPEEFVNRFFDSLFPLVYNHLINPGVTDSSLEYSECIRMARRDVSPFGNIPQRVMGQMGRSLLPSRTFLQALNLGIEVINTTDYLHFSKECSRALLKMQYCPHCQGLALTKPCMGYCLNVMRGCLAHMAELNPHWHAYIRSLEELSDAMHGTYDIGHVLLNFHLLVNDAVLQAHLNGQKLLEQVNRICGRPVRTPTQSPRCSFDQSKEKHGMKTTTRNSEETLANRRKEFINSLRLYRSFYGGLADQLCANELAAADGLPCWNGEDIVKSYTQRVVGNGIKAQSGNPEVKVKGIDPVINQIIDKLKHVVQGIQIIRMLENRTKLIKRMNLSSK

SEQ ID NO: 30982 - protein, 28 aa, Artificial Sequence
  Synthetic polypeptide
YFDYWGQGTLVTQSPPSKAPVQTAGVAS

SEQ ID NO: 30983 - protein, 51 aa, Artificial Sequence
  Synthetic polypeptide
MELGLSWIFLLAILKGVQCEVQLVESGGGLVQPGRSLRLSWRGSGKITKGH

SEQ ID NO: 30984 - protein, 125 aa, Artificial Sequence
  Synthetic polypeptide
MEFGLSWVFLVAIIKGVQCQVQLVESGGGLVKPGGSLRLSCAASGFTFSDYYMSWIRQAPGKGLEWVSYISSSGSTIYYADSVKGRFTISRDNAKNSLYLQMNSLRAEDTATSCRAKENFSTPHL

SEQ ID NO: 30985 - protein, 51 aa, Artificial Sequence
  Synthetic polypeptide
MEFGLSWVFLVALLRGVQCQVQLVESGGGVVQPGRSLRLSWRGSGKITKGH

SEQ ID NO: 30986 - protein, 69 aa, Artificial Sequence
  Synthetic polypeptide
MQFVLSWVFLVGILKGVQCEVQLVESGGGLVQPRGSLRLSCAASGFTLRSFRTAWQHGEMLSIHKRRNS

SEQ ID NO: 30987 - protein, 99 aa, Artificial Sequence
  Synthetic polypeptide
MDLMCKKMKHLWFFLLLVAAPRWVLSQLQLQESGPGLVKPSETLSLTCTVSGGSISSSSYYWGWIRQPPGKGLEWIGTKDQSGAAVNQCMSRITSHLHK

SEQ ID NO: 30988 - protein, 78 aa, Artificial Sequence
  Synthetic polypeptide
MEFWLSWVFLVAILKGVQCEVQLVESGGGLIQPGGSLRLSCAASGFTVKNNYTLGRVYTIQVMNVLKSQNLLLYNSSI

SEQ ID NO: 30989 - protein, 78 aa, Artificial Sequence
  Synthetic polypeptide
MEFGLSWVFLVAILKGVQCEVQLVESGGGLIQPGGSLRLSCAASGFTVKNNYTLGRVYTIQVMNVLKSQNLLLYNSSI

SEQ ID NO: 30990 - protein, 89 aa, Artificial Sequence
  Synthetic polypeptide
MDWTWRFLFVVAAATGVQSQVQLVQSGAEVKKPGSSVKVSCKASGGTFSSYAISWVRQAPGQGLEWMGGIIPIFGTRNYRKTRGNFEGT

SEQ ID NO: 30991 - protein, 1811 aa, Artificial Sequence
  Synthetic polypeptide
MADVDPDTLLEWLQMGQGDERDMQLIALEQLCMLLLMSDNVDRCFETCPPRTFLPALCKIFLDESAPDNVLEVTARAITYYLDVSAECTRRIVGVDGAIKALCNRLVVVELNNRTSRDLAEQCVKVLELICTRESGAVFEAGGLNCVLTFIRDSGHLVHKDTLHSAMAVVSRLCGKMEPQDSSLEICVESLSSLLKHEDHQVSDGALRCFASLADRFTRRGVDPAPLAKHGLTEELLSRMAAAGGTVSGPSSACKPGRSTTGAPSTTADSKLSNQVSTIVSLLSTLCRGSPVVTHDLLRSELPDSIESALQGDERCVLDTMRLVDLLLVLLFEGRKALPKSSAGSTGRIPGLRRLDSSGERSHRQLIDCIRSKDTDALIDAIDTGAFEVNFMDDVGQTLLNWASAFGTQEMVEFLCERGADVNRGQRSSSLHYAACFGRPQVAKTLLRHGANPDLRDEDGKTPLDKARERGHSEVVAILQSPGDWMCPVNKGDDKKKKDTNKDEEECNEPKGDPEMAPIYLKRLLPVFAQTFQQTMLPSIRKASLALIRKMIHFCSEALLKEVCDSDVGHNLPTILVEITATVLDQEDDDDGHLLALQIIRDLVDKGGDIFLDQLARLGVISKVSTLAGPSSDDENEEESKPEKEDEPQEDAKELQQGKPYHWRDWSIIRGRDCLYIWSDAAALELSNGSNGWFRFILDGKLATMYSSGSPEGGSDSSESRSEFLEKLQRARGQVKPSTSSQPILSAPGPTKLTVGNWSLTCLKEGEIAIHNSDGQQATILKEDLPGFVFESNRGTKHSFTAETSLGSEFVTGWTGKRGRKLKSKLEKTKQKVRTMARDLYDDHFKAVESMPRGVVVTLRNIATQLESSWELHTNRQCIESENTWRDLMKTALENLIVLLKDENTISPYEMCSSGLVQALLTVLNNSMDLDMKQDCSQLVERINVFKTAFSENEDDESRPAVALIRKLIAVLESIERLPLHLYDTPGSTYNLQILTRRLRFRLERAPGETALIDRTGRMLKMEPLATVESLEQYLLKMVAKQWYDFDRSSFVFVRKLREGQNFIFRHQHDFDENGIIYWIGTNAKTAYEWVNPAAYGLVVVTSSEGRNLPYGRLEDILSRDNSALNCHSNDDKNAWFAIDLGLWVIPSAYTLRHARGYGRSALRNWVFQVSKDGQNWTSLYTHVDDCSLNEPGSTATWPLDPPKDEKQGWRHVRIKQMGKNASGQTHYLSLSGFELYGTVNGVCEDQLGKAAKEAEANLRRQRRLVRSQVLKYMVPGARVIRGLDWKWRDQDGSPQGEGTVTGELHNGWIDVTWDAGGSNSYRMGAEGKFDLKLAPGYDPDTVASPKPVSSTVSGTTQSWSSLVKNNCPDKTSAAAGSSSRKGSSSSVCSVASSSDISLGSTKTERRSEIVMEHSIVSGADVHEPIVVLSSAENVPQTEVGSSSSASTSTLTAETGSENAERKLGPDSSVRTPGESSAISMGIVSVSSPDVSSVSELTNKEAASQRPLSSSASNRLSVSSLLAAGAPMSSSASVPNLSSRETSSLESFVRRVANIARTNATNNMNLSRSSSDNNTNTLGRNVMSTATSPLMGAQSFPNLTTPGTTSTVTMSTSSVTSSSNVATATTVLSVGQSLSNTLTTSLTSTSSESDTGQEAEYSLYDFLDSCRASTLLAELDDDEDLPEPDEEDDENEDDNQEDQEYEEVMILRRPSLQRRAGSRSDVTHHAVTSQLPQVPAGAGSRPIGEQEEEEYETKGGRRRTWDDDYVLKRQFSALVPAFDPRPGRTNVQQTTDLEIPPPGTVGYCAVKEIIF

SEQ ID NO: 30992 - protein, 1238 aa, Artificial Sequence
  Synthetic polypeptide
VFAQTFQQTMLPSIRKASLALIRKMIHFCSEALLKEVCDSDVGHNLPTILVEITATVLDQEDDDDGHLLALQIIRDLVDKGGDIFLDQLARLGVISKVSTLAGPSSDDENEEESKPEKEDEPQEDAKELQQGKPYHWRDWSIIRGRDCLYIWSDAAALELSNGSNGWFRFILDGKLATMYSSGSPEGGSDSSESRSEFLEKLQRARGQVKPSTSSQPILSAPGPTKLTVGNWSLTCLKEGEIAIHNSDGQQATILKEDLPGFVFESNRGTKHSFTAETSLGSEFVTGWTGKRGRKLKSKLEKTKQKVRTMARDLYDDHFKAVESMPRGVVVTLRNIATQLESSWELHTNRQCIESENTWRDLMKTALENLIVLLKDENTISPYEMCSSGLVQALLTVLNNSMDLDMKQDCSQLVERINVFKTAFSENEDDESRPAVALIRKLIAVLESIERLPLHLYDTPGSTYNLQILTRRLRFRLERAPGETALIDRTGRMLKMEPLATVESLEQYLLKMVAKQWYDFDRSSFVFVRKLREGQNFIFRHQHDFDENGIIYWIGTNAKTAYEWVNPAAYGLVVVTSSEGRNLPYGRLEDILSRDNSALNCHSNDDKNAWFAIDLGLWVIPSAYTLRHARGYGRSALRNWVFQVSKDGQNWTSLYTHVDDCSLNEPGSTATWPLDPPKDEKQGWRHVRIKQMGKNASGQTHYLSLSGFELYGTVNGVCEDQLGKAAKEAEANLRRQRRLVRSQVLKYMVPGARVIRGLDWKWRDQDGSPQGEGTVTGELHNGTTQSWSSLVKNNCPDKTSAAAGSSSRKGSSSSVCSVASSSDISLGSTKTERRSEIVMEHSIVSGADVHEPIVVLSSAENVPQTEVGSSSSASTSTLTAETGSENAERKLGPDSSVRTPGESSAISMGIVSVSSPDVSSVSELTNKEAASQRPLSSSASNRLSVSSLLAAGAPMSSSASVPNLSSRETSSLESFVRRVANIARTNATNNMNLSRSSSDNNTNTLGRNVMSTATSPLMGAQSFPNLTTPGTTSTVTMSTSSVTSSSNVATATTVLSVGQSLSNTLTTSLTSTSSESDTGQEAEYSLYDFLDSCRASTLLAELDDDEDLPEPDEEDDENEDDNQEDQEYEEVMILRRPSLQRRAGSRSDVTHHAVTSQLPQVPAGAGSRPIGEQEEEEYETKGGRRRTWDDDYVLKRQFSALVPAFDPRPGRTNVQQTTDLEIPPPGTVGYCAVKEIIF

SEQ ID NO: 30993 - protein, 8 aa, Artificial Sequence
  Synthetic polypeptide
MSVLGELS

SEQ ID NO: 30994 - protein, 750 aa, Artificial Sequence
  Synthetic polypeptide
MVEGRVSEFLKKLGFSGGGRQYQALEKDEEEALIDEQSELKAIEKEKKVTALPPKEACKCQKEDLARAFCVDLHTGLSEFSVTQRRLAHGWNEFVADNSEPVWKKYLDQFKNPLILLLLGSALVSVLTKEYEDAVSIATAVLVVVTVAFIQEYRSEKSLEELTKMVPPECNCLREGKLQHLLARELVPGDVVSLSIGDRIPADIRLTEVTDLLVDESSFTGEAEPCSKTDSPLTGGGDLTTLSNIVFMGTLVQYGRGQGVVIGTGESSQFGEVFKMMQAEETPKTPLQKSMDRLGKQLTLFSFGIIGLIMLIGWSQGKQLLSMFTIGVSLAVAAIPEGLPIVVMVTLVLGVLRMAKKRVIVKKLPIVETLGCCSVLCSDKTGTLTANEMTVTQLVTSDGLRAEVSGVGYDGQGTVCLLPSKEVIKEFSNVSVGKLVEAGCVANNAVIRKNAVMGQPTEGALMALAMKMDLSDIKNSYIRKKEIPFSSEQKWMAVKCSLKTEDQEDIYFMKGALEEVIRYCTMYNNGGIPLPLTPQQRSFCLQEEKRMGSLGLRVLALASGPELGRLTFLGLVGIIDPPRVGVKEAVQVLSESGVSVKMITGDALETALAIGRNIGLCNGKLQAMSGEEVDSVEKGELADRVGKVSVFFRTSPKHKLKIIKALQESGAIVAMTGDGVNDAVALKSADIGIAMGQTGTDVSKEAANMILVDDDFSAIIIGKNYFKVHMEAKKSPHRQVNPKPKEQSWRHHTT

SEQ ID NO: 30995 - protein, 261 aa, Artificial Sequence
  Synthetic polypeptide
MAGPRPSPWARLLLAALISVSLSGTLANRCKKAPVKSCTECVRVDKDCAYCTDEMFRDRRCNTQAELLAAGCQRESIVVMESSFQITEETQIDTTLRRSQMSPQGLRVRLRPGEERHFELEVFEPLESPVDLYILMDFSNSMSDDLDNLKKMGQNLARVLSQLTSDYTIGFGKFVDKVSVPQTDMRPEKLKEPWPNSDPPFSFKNVISLTEDVDEFRNKLQGERISGNLDAPEGGFDAILQTAVCTKTQKLAGCDARLWPQ

SEQ ID NO: 30996 - protein, 331 aa, Artificial Sequence
  Synthetic polypeptide
MAAAPRAGRRRGQPLLALLLLLLAPLPPGAPPGADAYFPEERWSPESPLQAPRVLIALLARNAAHALPTTLGALERLRHPRERTALWVATDHNMDNTSTVLREWLVAVKSLYHSVEWRPAEEPRSYPDEEGPKHWSDSRYEHVMKLRQAALKSARDMWADYILFVDADNLILNPDTLSLLIAENKTVVAPMLDSRAAYSNFWCGMTSQGYYKRTPAYIPIRKRDRRGCFAVPMVHSTFLIDLRKAASRNLAFYPPHPDYTWSFDDIIVFAFSCKQAEVQMYVCNKEEYGFLPVPLRAHSTLQDEAESFMHVQLEVMVRHGGTCLYSSYSGG

SEQ ID NO: 30997 - protein, 67 aa, Artificial Sequence
  Synthetic polypeptide
MDGPAEPQIPGLWDTYEDDISEISYLPKRNENAGSHKDRNNCGSFGSNSLTWKPPRCPLTEDWINTL

SEQ ID NO: 30998 - protein, 23 aa, Artificial Sequence
  Synthetic polypeptide
MATVYFTRATSQCKCSINYHLNI

SEQ ID NO: 30999 - protein, 17 aa, Artificial Sequence
  Synthetic polypeptide
MALSQCGPGKPKGWTLL

SEQ ID NO: 31000 - protein, 19 aa, Artificial Sequence
  Synthetic polypeptide
MAAAALRDPAQSRTDSHKW

SEQ ID NO: 31001 - protein, 18 aa, Artificial Sequence
  Synthetic polypeptide
MLETLTLISSLGGLRSGV

SEQ ID NO: 31002 - protein, 48 aa, Artificial Sequence
  Synthetic polypeptide
MVPSSPRALFLLLLILACPEPRASQASVPPASLPCPSRLSPLSLPPLS

SEQ ID NO: 31003 - protein, 347 aa, Artificial Sequence
  Synthetic polypeptide
MGLPRGPEGQGLPEVETREDEEQNVKLTEILELLVAAGYFRARIKGLSPFDKVVGGMTWCITTCNFDVDVDLLFQENSTIGQKIALSEKIVSVLPRMKCPHQLEPHQIQGMDFIHIFPVVQWLVKRAIETKEEMGDYIRSYSVSQFQKTYSLPEDDDFIKRKEKAIKTVVDLSEVYKPRRKYKRHQGAEELLDEESRIHATLLEYGRRYGFSRQSKMEKAEDKKTALPAGLSATEKADAHEEDELRAAEEQRIQSLMTKMTAMANEESRLTASSVGQIVGLCSAEIKQIVSEYAEKQSELSAEESPEKLGTSQLHRRKVISLNKQIAQKTKHLEEATVAELSSCRRP

SEQ ID NO: 31004 - protein, 346 aa, Artificial Sequence
  Synthetic polypeptide
MGLPRGPEGQGLPEVETREDEEQNVKLTEILELLVAAGYFRARIKGLSPFDKVVGGMTWCITTCNFDVDVDLLFQENSTIGQKIALSEKIVSVLPRMKCPHQLEPHQIQGMDFIHIFPVVQWLVKRAIETKEEMGDYIRSYSVSQFQKTYSLPEDDDFIKRKEKAIKTVVDLSEVYKPRRKYKRHQGAEELLDEESRIHATLLEYGRYGFSRQSKMEKAEDKKTALPAGLSATEKADAHEEDELRAAEEQRIQSLMTKMTAMANEESRLTASSVGQIVGLCSAEIKQIVSEYAEKQSELSAEESPEKLGTSQLHRRKVISLNKQIAQKTKHLEEATVAELSSCRRP

SEQ ID NO: 31005 - protein, 13 aa, Artificial Sequence
  Synthetic polypeptide
MISSTSVYAPKHY

SEQ ID NO: 31006 - protein, 24 aa, Artificial Sequence
  Synthetic polypeptide
MAACLGLPKCRDCSLCPAATPSGK

SEQ ID NO: 31007 - protein, 44 aa, Artificial Sequence
  Synthetic polypeptide
MWSGLPSRGLPIFKKLRRKRKMSHDTMETNQQNPKCKTFYRTND

SEQ ID NO: 31008 - protein, 81 aa, Artificial Sequence
  Synthetic polypeptide
MDMRVPAQLLGLLLLWFPGSRCDIQMTQSPSSVSASVGDRVTITCRASQGISSWLAWYQQKPGKAPKLLIYAASNGHSGQQ

SEQ ID NO: 31009 - protein, 79 aa, Artificial Sequence
  Synthetic polypeptide
MEPWKPQHSFFFLLLLWLPDTTGEIVMTQSPATLSLSPGERATLSCRASQSVSSSYLSWYQQKPGQAPRLLIYAAATRS

SEQ ID NO: 31010 - protein, 95 aa, Artificial Sequence
  Synthetic polypeptide
MTLATDGTADMFGIRFKRRGCSKKDYRVINHLLRESLLRKLSSHQPLHLVPCVASGWKLLSPTSESVCRFHRLSLGSRIDQINISRIMGAGFLTA

SEQ ID NO: 31011 - protein, 13 aa, Artificial Sequence
  Synthetic polypeptide
APVTGWQELKMPF

SEQ ID NO: 31012 - protein, 676 aa, Artificial Sequence
  Synthetic polypeptide
MADRRRAWNTEDDLPVYLARPGSAAQTPRQKYGGMFAAVEGAYENKTIDFDAYSVGRRGSARTPRSAGRPDAVGLPGPGGSEDTASDVSEPSGSAVSSPGERDERPPTLRIRRPAPRDLPLGRDNGQSDRLLIKGGRIINDDQSLYADVYLEDGLIKQIGENLIVPGGVKTIEANGRMVIPGGIDVNTYLQKPSQGMTAADDFFQGTRAALVGGTTMIIDHVVPEPGSSLLTSFEKWHEAADTKSCCDYSLHVDITSWYDGVREELEVLVQDKGVNSFQVYMAYKDVYQMSDSQLYEAFTFLKGLGAVILVHAENGDLIAQEQKRILEMGITGPEGHALSRPEELEAEAVFRAITIAGRINCPVYITKVMSKSAADIIALARKKGPLVFGEPIAASLGTDGTHYWSKNWAKAAAFVTSPPLSPDPTTPDYLTSLLACGDLQVTGSGHCPYSTAQKAVGKDNFTLIPEGVNGIEERMTVVWDKAVATGKMDENQFVAVTSTNAAKIFNLYPRKGRIAVGSDADVVIWDPDKLKTITAKSHKSAVEYNIFEGMECHGSPLVVISQGKIVFEDGNINVNKGMGRFIPRKAFPEHLYQRVKIRNKVFGLQGVSRGMYDGPVYEVPATPKYATPAPSAKSSPSKHQPPPIRNLHQSNFSLSGEAKYPPRLNPILELACPAT

SEQ ID NO: 31013 - protein, 560 aa, Artificial Sequence
  Synthetic polypeptide
MQKMNNEVVDKSDRLLIKGGRIINDDQSLYADVYLEDGLIKQIGENLIVPGGVKTIEANGRMVIPGGIDVNTYLQKPSQGMTAADDFFQGTRAALVGGTTMIIDHVVPEPGSSLLTSFEKWHEAADTKSCCDYSLHVDITSWYDGVREELEVLVQDKGVNSFQVYMAYKDVYQMSDSQLYEAFTFLKGLGAVILVHAENGDLIAQEQKRILEMGITGPEGHALSRPEELEAEAVFRAITIAGRINCPVYITKVMSKSAADIIALARKKGPLVFGEPIAASLGTDGTHYWSKNWAKAAAFVTSPPLSPDPTTPDYLTSLLACGDLQVTGSGHCPYSTAQKAVGKDNFTLIPEGVNGIEERMTVVWDKAVATGKMDENQFVAVTSTNAAKIFNLYPRKGRIAVGSDADVVIWDPDKLKTITAKSHKSAVEYNIFEGMECHGSPLVVISQGKIVFEDGNINVNKGMGRFIPRKAFPEHLYQRVKIRNKVFGLQGVSRGMYDGPVYEVPATPKYATPAPSAKSSPSKHQPPPIRNLHQSNFSLSGEAKYPPRLNPILELACPAT

SEQ ID NO: 31014 - protein, 562 aa, Artificial Sequence
  Synthetic polypeptide
MSYQGKKSIPHITSDRLLIKGGRIINDDQSLYADVYLEDGLIKQIGENLIVPGGVKTIEANGRMVIPGGIDVNTYLQKPSQGMTAADDFFQGTRAALVGGTTMIIDHVVPEPGSSLLTSFEKWHEAADTKSCCDYSLHVDITSWYDGVREELEVLVQDKGVNSFQVYMAYKDVYQMSDSQLYEAFTFLKGLGAVILVHAENGDLIAQEQKRILEMGITGPEGHALSRPEELEAEAVFRAITIAGRINCPVYITKVMSKSAADIIALARKKGPLVFGEPIAASLGTDGTHYWSKNWAKAAAFVTSPPLSPDPTTPDYLTSLLACGDLQVTGSGHCPYSTAQKAVGKDNFTLIPEGVNGIEERMTVVWDKAVATGKMDENQFVAVTSTNAAKIFNLYPRKGRIAVGSDADVVIWDPDKLKTITAKSHKSAVEYNIFEGMECHGSPLVVISQGKIVFEDGNINVNKGMGRFIPRKAFPEHLYQRVKIRNKVFGLQGVSRGMYDGPVYEVPATPKYATPAPSAKSSPSKHQPPPIRNLHQSNFSLSGEAKYPPRLNPILELACPAT

SEQ ID NO: 31015 - protein, 345 aa, Artificial Sequence
  Synthetic polypeptide
MATITCTRFTEEYQLFEELGKGAFSVVRRCVKVLAGQEYAAKIINTKKLSARDHQKLEREARICRLLKHPNIVRLHDSISEEGHHYLIFDLVTGGELFEDIVAREYYSEADASHCIQQILEAVLHCHQMGVVHRDLKPENLLLASKLKGAAVKLADFGLAIEVEGEQQAWFGFAGTPGYLSPEVLRKDPYGKPVDLWACGVILYILLVGYPPFWDEDQHRLYQQIKAGAYDFPSPEWDTVTPEAKDLINKMLTINPSKRITAAEALKHPWISHRSTVASCMHRQETVDCLKKFNARRKLKGAILTTMLATRNFSDAVASLDPRSCDSRLELRGASTLRLEEKALP

SEQ ID NO: 31016 - protein, 255 aa, Artificial Sequence
  Synthetic polypeptide
MAASGSGMAQKTWELANNMQEAQSIDEIYKYDKKQQQEILAAKPWTKDHHYFKYCKISALALLKMVMHARSGGNLEVMGLMLGKVDGETMIIMDSFALPVEGTETRVNAQAAAYEYMAAYIENAKQVGRLENAIGWYHSHPGYGCWLSGIDVSTQMLNQQFQEPFVAVVIDPTRTISAGKVNLGAFRTYPKGYKPPDEGPSEYQTIPLNKIEDFGVHCKQMTSHLTKNKILSPYHRLHTSVWSGSYSLCELMSYH

SEQ ID NO: 31017 - protein, 520 aa, Artificial Sequence
  Synthetic polypeptide
MANPKEKTAMCLVNELARFNRVQPQYKLLNERGPAHSKMFSVQLSLGEQTWESEGSSIKKAQQAVANKALTESTLPKPVQKPPKSNVNNNPGSITPTVELNGLAMKRGEPAIYRPLDPKPFPNYRANYNFRGMYNQRYHCPVPKIFYVQLTVGNNEFFGEGKTRQAARHNAAMKALQALQNEPIPERSPQNGESGKDVDDDKDANKSEISLVFEIALKRNMPVSFEVIKESGPPHMKSFVTRVSVGEFSAEGEGNSKKLSKKRAATTVLQELKKLPPLPVVEKPKLFFKKRPKTIVKAGPEYGQGMNPISRLAQIQQAKKEKEPDYVLLSERGMPRRREFVMQVKVGNEVATGTGPNKKIAKKNAAEAMLLQLGYKASTNLQDQLEKTGENKGWSGPKPGFPEPTNNTPKGILHLSPDVYQEMEASRHKVISGTTLGYLSPKDMNQPSSSFFSISPTSNSSATIARELLMNGTSSTAEAIGLKGSSPTPPCSPVQPSKQLEYLARIQGFQASLFPETQQY

SEQ ID NO: 31018 - protein, 482 aa, Artificial Sequence
  Synthetic polypeptide
MFSVQLSLGEQTWESEGSSIKKAQQAVANKALTESTLPKPVQKPPKSNVNNNPGSITPTVELNGLAMKRGEPAIYRPLDPKPFPNYRANYNFRGMYNQRYHCPVPKIFYVQLTVGNNEFFGEGKTRQAARHNAAMKALQALQNEPIPERSPQNGESGKDVDDDKDANKSEISLVFEIALKRNMPVSFEVIKESGPPHMKSFVTRVSVGEFSAEGEGNSKKLSKKRAATTVLQELKKLPPLPVVEKPKLFFKKRPKTIVKAGPEYGQGMNPISRLAQIQQAKKEKEPDYVLLSERGMPRRREFVMQVKVGNEVATGTGPNKKIAKKNAAEAMLLQLGYKASTNLQDQLEKTGENKGWSGPKPGFPEPTNNTPKGILHLSPDVYQEMEASRHKVISGTTLGYLSPKDMNQPSSSFFSISPTSNSSATIARELLMNGTSSTAEAIGLKGSSPTPPCSPVQPSKQLEYLARIQGFQASLFPETQQY

SEQ ID NO: 31019 - protein, 348 aa, Artificial Sequence
  Synthetic polypeptide
MKALQALQNEPIPERSPQNGESGKDVDDDKDANKSEISLVFEIALKRNMPVSFEVIKESGPPHMKSFVTRVSVGEFSAEGEGNSKKLSKKRAATTVLQELKKLPPLPVVEKPKLFFKKRPKTIVKAGPEYGQGMNPISRLAQIQQAKKEKEPDYVLLSERGMPRRREFVMQVKVGNEVATGTGPNKKIAKKNAAEAMLLQLGYKASTNLQDQLEKTGENKGWSGPKPGFPEPTNNTPKGILHLSPDVYQEMEASRHKVISGTTLGYLSPKDMNQPSSSFFSISPTSNSSATIARELLMNGTSSTAEAIGLKGSSPTPPCSPVQPSKQLEYLARIQGFQASLFPETQQY

SEQ ID NO: 31020 - protein, 416 aa, Artificial Sequence
  Synthetic polypeptide
MKRGEPAIYRPLDPKPFPNYRANYNFRGMYNQRYHCPVPKIFYVQLTVGNNEFFGEGKTRQAARHNAAMKALQALQNEPIPERSPQNGESGKDVDDDKDANKSEISLVFEIALKRNMPVSFEVIKESGPPHMKSFVTRVSVGEFSAEGEGNSKKLSKKRAATTVLQELKKLPPLPVVEKPKLFFKKRPKTIVKAGPEYGQGMNPISRLAQIQQAKKEKEPDYVLLSERGMPRRREFVMQVKVGNEVATGTGPNKKIAKKNAAEAMLLQLGYKASTNLQDQLEKTGENKGWSGPKPGFPEPTNNTPKGILHLSPDVYQEMEASRHKVISGTTLGYLSPKDMNQPSSSFFSISPTSNSSATIARELLMNGTSSTAEAIGLKGSSPTPPCSPVQPSKQLEYLARIQGFQASLFPETQQY

SEQ ID NO: 31021 - protein, 488 aa, Artificial Sequence
  Synthetic polypeptide
MLQINQMFSVQLSLGEQTWESEGSSIKKAQQAVANKALTESTLPKPVQKPPKSNVNNNPGSITPTVELNGLAMKRGEPAIYRPLDPKPFPNYRANYNFRGMYNQRYHCPVPKIFYVQLTVGNNEFFGEGKTRQAARHNAAMKALQALQNEPIPERSPQNGESGKDVDDDKDANKSEISLVFEIALKRNMPVSFEVIKESGPPHMKSFVTRVSVGEFSAEGEGNSKKLSKKRAATTVLQELKKLPPLPVVEKPKLFFKKRPKTIVKAGPEYGQGMNPISRLAQIQQAKKEKEPDYVLLSERGMPRRREFVMQVKVGNEVATGTGPNKKIAKKNAAEAMLLQLGYKASTNLQDQLEKTGENKGWSGPKPGFPEPTNNTPKGILHLSPDVYQEMEASRHKVISGTTLGYLSPKDMNQPSSSFFSISPTSNSSATIARELLMNGTSSTAEAIGLKGSSPTPPCSPVQPSKQLEYLARIQGFQASLFPETQQY

SEQ ID NO: 31022 - protein, 300 aa, Artificial Sequence
  Synthetic polypeptide
MPVSFEVIKESGPPHMKSFVTRVSVGEFSAEGEGNSKKLSKKRAATTVLQELKKLPPLPVVEKPKLFFKKRPKTIVKAGPEYGQGMNPISRLAQIQQAKKEKEPDYVLLSERGMPRRREFVMQVKVGNEVATGTGPNKKIAKKNAAEAMLLQLGYKASTNLQDQLEKTGENKGWSGPKPGFPEPTNNTPKGILHLSPDVYQEMEASRHKVISGTTLGYLSPKDMNQPSSSFFSISPTSNSSATIARELLMNGTSSTAEAIGLKGSSPTPPCSPVQPSKQLEYLARIQGFQASLFPETQQY

SEQ ID NO: 31023 - protein, 500 aa, Artificial Sequence
  Synthetic polypeptide
MVARPLHSTEGQPESLGKMFSVQLSLGEQTWESEGSSIKKAQQAVANKALTESTLPKPVQKPPKSNVNNNPGSITPTVELNGLAMKRGEPAIYRPLDPKPFPNYRANYNFRGMYNQRYHCPVPKIFYVQLTVGNNEFFGEGKTRQAARHNAAMKALQALQNEPIPERSPQNGESGKDVDDDKDANKSEISLVFEIALKRNMPVSFEVIKESGPPHMKSFVTRVSVGEFSAEGEGNSKKLSKKRAATTVLQELKKLPPLPVVEKPKLFFKKRPKTIVKAGPEYGQGMNPISRLAQIQQAKKEKEPDYVLLSERGMPRRREFVMQVKVGNEVATGTGPNKKIAKKNAAEAMLLQLGYKASTNLQDQLEKTGENKGWSGPKPGFPEPTNNTPKGILHLSPDVYQEMEASRHKVISGTTLGYLSPKDMNQPSSSFFSISPTSNSSATIARELLMNGTSSTAEAIGLKGSSPTPPCSPVQPSKQLEYLARIQGFQASLFPETQQY

SEQ ID NO: 31024 - protein, 133 aa, Artificial Sequence
  Synthetic polypeptide
TGENKGWSGPKPGFPEPTNNTPKGILHLSPDVYQEMEASRHKVISGTTLGYLSPKDMNQPSSSFFSISPTSNSSATIARELLMNGTSSTAEAIGLKGSSPTPPCSPVQPSKQLEYLARIQGFQASLFPETQQY

SEQ ID NO: 31025 - protein, 281 aa, Artificial Sequence
  Synthetic polypeptide
MEDHNCEQLCVNVPGSFVCQCYSGYALAEDGKRCVAVDYCASENHGCEHECVNADGSYLCQCHEGFALNPDKKTCTKIDYCASSNHGCQHECVNTDDSYSCHCLKGFTLNPDKKTCRRINYCALNKPGCEHECVNMEESYYCRCHRGYTLDPNGKTCSRVDHCAQQDHGCEQLCLNTEDSFVCQCSEGFLINEDLKTCSRVDYCLLSDHGCEYSCVNMDRSFACQCPEGHVLRSDGKTCAMAQNIPEGQKLDILLNKCESCILQGGCVGESGKPSWPQTST

SEQ ID NO: 31026 - protein, 565 aa, Artificial Sequence
  Synthetic polypeptide
MEKMLAGCFLLILGQIVLLPAEARERSRGRSISRGRHARTHPQTALLESSCENKRADLVFIIDSSRSVNTHDYAKVKEFIVDILQFLDIGPDVTRVGLLQYGSTVKNEFSLKTFKRKSEVERAVKRMRHLSTGTMTGLAIQYALNIAFSEAEGARPLRENVPRVIMIVTDGRPQDSVAEVAAKARDTGILIFAIGVGQVDFNTLKSIGSEPHEDHVFLVANFSQIETLTSVFQKKLCTAHMCSTLEHNCAHFCINIPGSYVCRCKQGYILNSDQTTCRIQDLCAMEDHNCEQLCVNVPGSFVCQCYSGYALAEDGKRCVAVDYCASENHGCEHECVNADGSYLCQCHEGFALNPDKKTCTKIDYCASSNHGCQHECVNTDDSYSCHCLKGFTLNPDKKTCRRINYCALNKPGCEHECVNMEESYYCRCHRGYTLDPNGKTCSRVDHCAQQDHGCEQLCLNTEDSFVCQCSEGFLINEDLKTCSRVDYCLLSDHGCEYSCVNMDRSFACQCPEGHVLRSDGKTCAMAQNIPEGQKLDILLNKCESCILQGGCVGESGKPSWPQTST

SEQ ID NO: 31027 - protein, 524 aa, Artificial Sequence
  Synthetic polypeptide
MEKMLAGCFLLILGQIVLLPAEARERSRGRSISRGRHARTHPQTALLESSCENKRADLVFIIDSSRSVNTHDYAKVKEFIVDILQFLDIGPDVTRVGLLQYGSTVKNEFSLKTFKRKSEVERAVKRMRHLSTGTMTGLAIQYALNIAFSEAEGARPLRENVPRVIMIVTDGRPQDSVAEVAAKARDTGILIFAIGVGQVDFNTLKSIGSEPHEDHVFLVANFSQIETLTSVFQKKLCTAHMCSTLEHNCAHFCINIPGSYVCRCKQGYILNSDQTTCRIQDLCAMEDHNCEQLCVNVPGSFVCQCYSGYALAEDGKRCVAVDYCASENHGCEHECVNADGSYLCQCHEGFALNPDKKTCTRINYCALNKPGCEHECVNMEESYYCRCHRGYTLDPNGKTCSRVDHCAQQDHGCEQLCLNTEDSFVCQCSEGFLINEDLKTCSRVDYCLLSDHGCEYSCVNMDRSFACQCPEGHVLRSDGKTCAMAQNIPEGQKLDILLNKCESCILQGGCVGESGKPSWPQTST

SEQ ID NO: 31028 - protein, 32 aa, Artificial Sequence
  Synthetic polypeptide
MGWMGEAVRTVGGRKVLGVTPGLWSISINGSS

SEQ ID NO: 31029 - protein, 346 aa, Artificial Sequence
  Synthetic polypeptide
MMGCFALQTVDTELTADSVEWCPLQGCRHLLACGTYQLRRPEDRPAGPQNKGGMEVKEPQVRLGRLFLYSFNDNNSIHPLVEVQRKDTSAILDMKWCHIPVAGHALLGLADASGSIQLLRLVESEKSHVLEPLSSLALEEQCLALSLDWSTGKTGRAGDQPLKIISSDSTGQLHLLMVNETRPRLQKVASWQAHQFEAWIAAFNYWHPEIVYSGGDDGLLRGWDTRVPGKFLFTSKRHTMGVCSIQSSPHREHILATGSYDEHILLWDTRNMKQPLADTPVQGGVWRIKWHPFHHHLLLAACMHSGFKILNCQKAMAPSFRCLLHFGRPLTPLGPLVWRLGHPSLP

SEQ ID NO: 31030 - protein, 31 aa, Artificial Sequence
  Synthetic polypeptide
MSGKVTKPKEEKDASKGVSLHKLSVCLLSST

SEQ ID NO: 31031 - protein, 41 aa, Artificial Sequence; identical to SEQ ID NO: 4991
  Synthetic polypeptide

SEQ ID NO: 31032 - protein, 1530 aa, Artificial Sequence
  Synthetic polypeptide
PLCSHTGKWGCTTCFTRLLLSSLSSLGDSAPERKSPSHHRQPSDASETTGLVQRCVIIQKDQHGFGFTVSGDRIVLVQSVRPGGAAMKAGVKEGDRIIKVNGTMVTNSSHLEVVKLIKSGAYVALTLLGSSPSSMGISGLQQDPSPAGAPRITSVIPSPPPPPPLPPPQRITGPKPLQDPEVQKHATQILRNMLRQEEKELQDILPLYGDTSQRPSEGRLSLDSQEGDSGLDSGTERFPSLSESLMNRNSVLSDPGLDSPRTSPVIMARVAQHHRRQGSDAAVPSTGDQGVDQSPKPLIIGPEEDYDPGYFNNESDIIFQDLEKLKSRPAHLGVFLRYIFSQADPSPLLFYLCAEVYQQASPKDSRSLGKDIWNIFLEKNAPLRVKIPEMLQAEIDSRLRNSEDARGVLCEAQEAAMPEIQEQIHDYRTKRTLGLGSLYGENDLLDLDGDPLRERQVAEKQLAALGDILSKYEEDRSAPMDFALNTYMSHAGIRLREARPSNTAEKAQSAPDKDKWLPFFPKTKKSSNSKKEKDALEDKKRNPILKYIGKPKSSSQSTFHIPLSPVEVKPGNVRNIIQHFENNQQYDAPEPGTQRLSTGSFPEDLLESDSSRSEIRLGRSESLKGREEMKRSRKAENVPRSRSDVDMDAAAEATRLHQSASSSTSSLSTRSLENPTPPFTPKMGRRSIESPSLGFCTDTLLPHLLEDDLGQLSDLEPEPDAQNWQHTVGKDVVAGLTQREIDRQEVINELFVTEASHLRTLRVLDLIFYQRMKKENLMPREELARLFPNLPELIEIHNSWCEAMKKLREEGPIIKEISDLMLARFDGPAREELQQVAAQFCSYQSIALELIKTKQRKESRFQLFMQEAESHPQCRRLQLRDLIISEMQRLTKYPLLLESIIKHTEGGTSEHEKLCRARDQCREILKYVNEAVKQTENRHRLEGYQKRLDATALERASNPLAAEFKSLDLTTRKMIHEGPLTWRISKDKTLDLHVLLLEDLLVLLQKQDEKLLLKCHSKTAVGSSDSKQTFSPVLKLNAVLIRSVATDKRAFFIICTSKLGPPQIYELVALTSSDKNTWMELLEEAVRNATRHPGAAPMPVHPPPPGPREPAQQGPTPSRVELDDSDVFHGEPEPEELPGGTGSQQRVQGKHQVLLEDPEQEGSAEEEELGVLPCPSTSLDGENRGIRTRNPIHLAFPGPLFMEGLADSALEDVENLRHLILWSLLPGHTMETQAAQEPEDDLTPTPSVISVTSHPWDPGSPGQAPPGGEGDNTQLAGLEGERPEQEDMGLCSLEHLPPRTRNSGIWESPELDRNLAEDASSTEAAGGYKVVRKAEVAGSKVVPALPESGQSEPGPPEVEGGTKATGNCFYVSMPSGPPDSSTDHSEAPMSPPQPDSLPAGQTEPQPQLQGGNDDPRRPSRSPPSLALRDVGMIFHTIEQLTLKLNRLKDMELAHRELLKSLGGESSGGTTPVGSFHTEAARWTDGSLSPPAKEPLASDSRNSHELGPCPEDGSDAPLEDSTADAAASPGP

SEQ ID NO: 31033 - protein, 1570 aa, Artificial Sequence
  Synthetic polypeptide
PLCSHTGKWGCTTCFTRLLLSSLSSLGDSAPERKSPSHHRQPSDASETTGLVQRCVIIQKDQHGFGFTVSGDRIVLVQSVRPGGAAMKAGVKEGDRIIKVNGTMVTNSSHLEVVKLIKSGAYVALTLLGSSPSSMGISGLQQDPSPAGAPRITSVIPSPPPPPPLPPPQRITGPKPLQDPEVQKHATQILRNMLRQEEKELQRICEVYSRNPASLLEEQIEGARRRVTQLQLKIQQETGGSVDILPLYGDTSQRPSEGRLSLDSQEGDSGLDSGTERFPSLSESLMNRNSVLSDPGLDSPRTSPVIMARVAQHHRRQGSDAAVPSTGDQGVDQSPKPLIIGPEEDYDPGYFNNESDIIFQDLEKLKSRPAHLGVFLRYIFSQADPSPLLFYLCAEVYQQASPKDSRSLGKDIWNIFLEKNAPLRVKIPEMLQAEIDSRLRNSEDARGVLCEAQEAAMPEIQEQIHDYRTKRTLGLGSLYGENDLLDLDGDPLRERQVAEKQLAALGDILSKYEEDRSAPMDFALNTYMSHAGIRLREARPSNTAEKAQSAPDKDKWLPFFPKTKKSSNSKKEKDALEDKKRNPILKYIGKPKSSSQSTFHIPLSPVEVKPGNVRNIIQHFENNQQYDAPEPGTQRLSTGSFPEDLLESDSSRSEIRLGRSESLKGREEMKRSRKAENVPRSRSDVDMDAAAEATRLHQSASSSTSSLSTRSLENPTPPFTPKMGRRSIESPSLGFCTDTLLPHLLEDDLGQLSDLEPEPDAQNWQHTVGKDVVAGLTQREIDRQEVINELFVTEASHLRTLRVLDLIFYQRMKKENLMPREELARLFPNLPELIEIHNSWCEAMKKLREEGPIIKEISDLMLARFDGPAREELQQVAAQFCSYQSIALELIKTKQRKESRFQLFMQEAESHPQCRRLQLRDLIISEMQRLTKYPLLLESIIKHTEGGTSEHEKLCRARDQCREILKYVNEAVKQTENRHRLEGYQKRLDATALERASNPLAAEFKSLDLTTRKMIHEGPLTWRISKDKTLDLHVLLLEDLLVLLQKQDEKLLLKCHSKTAVGSSDSKQTFSPVLKLNAVLIRSVATDKRAFFIICTSKLGPPQIYELVALTSSDKNTWMELLEEAVRNATRHPGAAPMPVHPPPPGPREPAQQGPTPSRVELDDSDVFHGEPEPEELPGGTGSQQRVQGKHQVLLEDPEQEGSAEEEELGVLPCPSTSLDGENRGIRTRNPIHLAFPGPLFMEGLADSALEDVENLRHLILWSLLPGHTMETQAAQEPEDDLTPTPSVISVTSHPWDPGSPGQAPPGGEGDNTQLAGLEGERPEQEDMGLCSLEHLPPRTRNSGIWESPELDRNLAEDASSTEAAGGYKVVRKAEVAGSKVVPALPESGQSEPGPPEVEGGTKATGNCFYVSMPSGPPDSSTDHSEAPMSPPQPDSLPAGQTEPQPQLQGGNDDPRRPSRSPPSLALRDVGMIFHTIEQLTLKLNRLKDMELAHRELLKSLGGESSGGTTPVGSFHTEAARWTDGSLSPPAKEPLASDSRNSHELGPCPEDGSDAPLEDSTADAAASPGP

SEQ ID NO: 31034 - protein, 694 aa, Artificial Sequence
  Synthetic polypeptide
MVEGDQLPPGHTVSQYETCKIRTIKAGTLEKLVENLLTAFGDNDFTYISIFLSTYRGFASTKEVLELLLDRYGNLTSPNCEEDGSQSSSESKMVIRNAIASILRAWLDQCAEDFREPPHFPCLQKLLDYLTRMMPGSDPERRAQNLLEQFQKQEVETDNGLPNTISFSLEEEEELEGGESAEFTCFSEDLVAEQLTYMDAQLFKKVVPHHCLGCIWSRRDKKENKHLAPTIRATISQFNTLTKCVVSTILGGKELKTQQRAKIIEKWINIAHECRLLKNFSSLRAIVSALQSNSIYRLKKTWAAVPRDRMLMFEELSDIFSDHNNHLTSRELLMKEGTSKFANLDSSVKENQKRTQRRLQLQKDMGGLINFEKRRREFEVIAQIKLLQSACNSYCMTPDQKFIQWFQRQQLLTEEESYALSCEIEAAADASTTSPKPRKSMVKRLSLLFLGSDMITSPTPTKEQPKSTASGSSGESMDSVSVSSCESNHSEAEEGSITPMDTPDEPQKKLSESSSSCSSIHSMDTNSSGMSSLINPLSSPPSCNNNPKIHKRSVSVTSITSTVLPPVYNQQNEDTCIIRISVEDNNGNMYKSIMLTSQDKTPAVIQRAMLKHNLDSDPAEEYELVQVISEDKELVIPDSANVFYAMNSQVNFDFILRKKNSMEEQVKLRSRTSLTLPRTAKRGCWSNRHSKITL

SEQ ID NO: 31035 - protein, 723 aa, Artificial Sequence [sequence omitted]

SEQ ID NO: 31036 - protein, 53 aa, Artificial Sequence; identical to SEQ ID NO: 5781
  Synthetic polypeptide

SEQ ID NO: 31037 - protein, 46 aa, Artificial Sequence
  Synthetic polypeptide
SHLLGRLSQENHWNLIKYFDKRRDYLKFKEKFEAGQFEPSETTAKS

SEQ ID NO: 31038 - protein, 42 aa, Artificial Sequence
  Synthetic polypeptide
PAAVALACNPSTLRGRGMPRRIGNAFRSISFLQHFTHSRIIV

SEQ ID NO: 31039 - protein, 27 aa, Artificial Sequence
  Synthetic polypeptide
KATHFILQKPLKVLGVGSTRLTCEPSM

SEQ ID NO: 31040 - protein, 9 aa, Artificial Sequence
  Synthetic polypeptide
SLNLYNCNS

SEQ ID NO: 31041 - protein, 232 aa, Artificial Sequence; identical to SEQ ID NO: 7107
  Synthetic polypeptide

SEQ ID NO: 31042 - protein, 36 aa, Artificial Sequence
  Synthetic polypeptide
DQPGKHSKTSSLQKMKKLASVFQLQLLRSHPGGFSQ

SEQ ID NO: 31043 - protein, 96 aa, Artificial Sequence
  Synthetic polypeptide
ICKAMLELLEDPVLCALAKKHKRTPALIALRYQLQRGVVVLAKSYNEQRIRQNVQVFEFQLTSEEMKAIDGLNRNVRYLTLDIFAGPPNYPFSDEY

SEQ ID NO: 31044 - protein, 588 aa, Artificial Sequence
  Synthetic polypeptide
AQEFKAASRGVTFLFPIQAKTFHHVYSGKDLIAQARTGTGKTFSFAIPLIEKLHGELQDRKRGRAPQVLVLAPTRELANQVSKDFSDITKKLSVACFYGGTPYGGQFERMRNGIDILVGTPGRIKDHIQNGKLDLTKLKHVVLDEVDQMLDMGFADQVEEILSVAYKKDSEDNPQTLLFSATCPHWVFNVAKKYMKSTYEQVDLIGKKTQKTAITVEHLAIKCHWTQRAAVIGDVIRVYSGHQGRTIIFCETKKEAQELSQNSAIKQDAQSLHGDIPQKQREITLKGFRNGSFGVLVATNVAARGLDIPEVDLVIQSSPPKDVESYIHRSGRTGRAGRTGVCICFYQHKEEYQLVQVEQKAGIKFKRIGVPSATEIIKASSKDAIRLLDSVPPTAISHFKQSAEKLIEEKGAVEALAAALAHISGATSVDQRSLINSNVGFVTMILQCSIEMPNISYAWKELKEQLGEEIDSKVKGMVFLKGKLGVCFDVPTASVTEIQEKWHDSRRWQLSVATEQPELEGPREGYGGFRGQREGSRGFRGQRDGNRRFRGQREGSRGPRGQRSGGGNKSNRSQNKGQKRSFSKAFGQ

SEQ ID NO: 31045 - protein, 24 aa, Artificial Sequence
  Synthetic polypeptide
LLPVIPELWEAEMRKRKQRKLIMN

SEQ ID NO: 31046 - protein, 24 aa, Artificial Sequence
  Synthetic polypeptide
FQTSGLQNCSFKRWSMILKTMKVE

SEQ ID NO: 31047 - protein, 36 aa, Artificial Sequence
  Synthetic polypeptide
TVEQGVGVWRGPQFQQSRCSHGPNQGGRCHPSSGGV

SEQ ID NO: 31048 - protein, 30 aa, Artificial Sequence
  Synthetic polypeptide
TVEQGVGVWRGPQFQQSRCSHGPNQGSAPG

SEQ ID NO: 31049 - protein, 8 aa, Artificial Sequence
  Synthetic polypeptide
MTDGGLAL

SEQ ID NO: 31050 - protein, 32 aa, Artificial Sequence
  Synthetic polypeptide
GGDWLIQVFKGSLSLSTKILWWSQGKIYCLLL

SEQ ID NO: 31051 - protein, 12 aa, Artificial Sequence
  Synthetic polypeptide
QLLCIVSNQKIV

SEQ ID NO: 31052 - protein, 77 aa, Artificial Sequence
  Synthetic polypeptide
QLLCIVSNQKIVSASPSTLARLVSRLAMPAGSSTAWNTASSPMARCQVTRPLGEEMIPSTPSSVKRVLASMCPGQCL

SEQ ID NO: 31053 - protein, 20 aa, Artificial Sequence
  Synthetic polypeptide
KFRDDSEPGMPVLPPRCMVA

SEQ ID NO: 31054 - protein, 17 aa, Artificial Sequence
  Synthetic polypeptide
KFRDDSEPGMPVLPPRI

SEQ ID NO: 31055 - protein, 27 aa, Artificial Sequence
  Synthetic polypeptide
WVYEVQAGAARDALQGFKITQNNAMKI

SEQ ID NO: 31056 - protein, 32 aa, Artificial Sequence
  Synthetic polypeptide
WVYEVQAGAARDALQGFKITQNNAMKISFAKK

SEQ ID NO: 31057 - protein, 172 aa, Artificial Sequence
  Synthetic polypeptide
IVGNMFNQMAKWVKQDNETGIYYETWNVKASPEKGAETWFDSYDCSKFVLRTFNKLAEFGAEFKNIETNYTRIFLYSGEPTYLGNETSVFGPTGNKTLGLAIKRFYYPFKPHLPTKEFLLSLLQIFDAVIVHKQFYLFYNFEYWFLPMKFPFIKITYEEIPLPIRNKTLSGL

SEQ ID NO: 31058 - protein, 112 aa, Artificial Sequence
  Synthetic polypeptide
MSPQLLTPGSGAHSQVQLVQSGAEVKKPGASVKVSCKASGYTFTSYGISWVRQAPGQGLEWMGWISAYNGNTNYAQKLQGRVTMTTDTSTSTAYMELRSLRSDDTAVYYCAR

SEQ ID NO: 31059 - protein, 350 aa, Artificial Sequence
  Synthetic polypeptide
SHLLGRLKQENHLNLGGKGCSELRSRHCTPAWQQSETRLHLKKKKADATLLKKSEKLLAELDRSGLPSAPGAPRRRGSMPVPYKHQLRRAQAVDELDWPPQASSSGSSDSLGSGEAAPAQKDGIFKVMLVGESGVGKSTLAGTFGGLQGDSAHEPENPEDTYERRIMVDKEEVTLVVYDIWEQGDAGGWLRDHCLQTGDAFLIVFSVTDRRSFSKVPETLLRLRAGRPHHDLPVILVGNKSDLARSREVSLEEGRHLAGTLSCKHIETSAALHHNTRELFEGAVRQIRLRRGRNHAGGQRPDPGSPEGPAPPARRESLTKKAKRFLANLVPRNAKFFKQRSRSCHDLSVL

SEQ ID NO: 31060 - protein, 231 aa, Artificial Sequence
  Synthetic polypeptide
SHLLGRLKQENHLNLGGKGCSELRSRHCTPAWQQSETRLHLKKKKADATLLKKSEKLLAELDRSGLPSAPGAPRRRGSMPVPYKHQLRRAQAVDELDWPPQASSSGSSDSLGSGEAAPAQKDGIFKVMLVGESGVGKSTLAGTFGGLQGDSAHEPENPGGCRRVAAGPLPSDRGRLSHRLLSHRPTEFLQSSRDPTSAPGWEAAPRPTRYPRWKQERLGPLPGGITGGCVS

SEQ ID NO: 31061 - protein, 31 aa, Artificial Sequence
  Synthetic polypeptide
HACNSSTLGGQGREFETSLANMLLDHYQNCK

SEQ ID NO: 31062 - protein, 60 aa, Artificial Sequence; identical to SEQ ID NO: 11168
  Synthetic polypeptide

SEQ ID NO: 31063 - protein, 238 aa, Artificial Sequence
  Synthetic polypeptide
GQAQWLTPVVIPAPWEAKAGGSRGQEIKTILANTEWTYPMRREMQEILPGLFLGPYSSAMKSKLPVLQKHGITHIICIRQNIEANFIKPNFQQLFRYLVLDIADNPVENIIRFFPMTKEFIDGSLQMGGKVLVHGNAGISRSAAFVIAYIMETFGMKYRDAFAYVQERRFCINPNAGFVHQLQEYEAIYLAKLTIQMMSPLQIERSLSVHSGTTGSLKRTHEEEDDFGTMQVATAQNG

SEQ ID NO: 31064 - protein, 237 aa, Artificial Sequence
  Synthetic polypeptide
GRAWWLTPVIPALWEVEVGGSRGQEIKTILANTEWTYPMRREMQEILPGLFLGPYSSAMKSKLPVLQKHGITHIICIRQNIEANFIKPNFQQLFRYLVLDIADNPVENIIRFFPMTKEFIDGSLQMGGKVLVHGNAGISRSAAFVIAYIMETFGMKYRDAFAYVQERRFCINPNAGFVHQLQEYEAIYLAKLTIQMMSPLQIERSLSVHSGTTGSLKRTHEEEDDFGTMQVATAQNG

SEQ ID NO: 31065 - protein, 237 aa, Artificial Sequence
  Synthetic polypeptide
GRAWWLTPVIPALWEAEADGSRGQEIKTILANTEWTYPMRREMQEILPGLFLGPYSSAMKSKLPVLQKHGITHIICIRQNIEANFIKPNFQQLFRYLVLDIADNPVENIIRFFPMTKEFIDGSLQMGGKVLVHGNAGISRSAAFVIAYIMETFGMKYRDAFAYVQERRFCINPNAGFVHQLQEYEAIYLAKLTIQMMSPLQIERSLSVHSGTTGSLKRTHEEEDDFGTMQVATAQNG

SEQ ID NO: 31066 - protein, 32 aa, Artificial Sequence
  Synthetic polypeptide
KTAWLTCLLPSAFGQMSPSQRLFPGQPMVSNK

SEQ ID NO: 31067 - protein, 35 aa, Artificial Sequence
  Synthetic polypeptide
SQLLRRLRHEKYLSPEAEVAVSRDCATALQPGVKG

SEQ ID NO: 31068 - protein, 41 aa, Artificial Sequence
  Synthetic polypeptide
GLPSHTELSMICSRASMTPLWGRPPWPRSTRQCCMMGGRWP

SEQ ID NO: 31069 - protein, 14 aa, Artificial Sequence
  Synthetic polypeptide
TDSREAEFPQKKKN

SEQ ID NO: 31070 - protein, 37 aa, Artificial Sequence
  Synthetic polypeptide
FLGLGFFICNMRRKMMTLKKEIFQSTRDLQHLSTSQR

SEQ ID NO: 31071 - protein, 63 aa, Artificial Sequence
  Synthetic polypeptide
FRASCLRSLGLSFHICIIEAAGRGGEAVKTGEAAGGAGEAAGEGEAAGRGGGAPGAGEASATG

SEQ ID NO: 31072 - protein, 52 aa, Artificial Sequence
  Synthetic polypeptide
NPSTLGGQASPSPSPKVLWWPWWARWAAESRPCSQPSWLRWTKWRGTWLSRA

SEQ ID NO: 31073 - protein, 85 aa, Artificial Sequence
  Synthetic polypeptide
NPSTLGGQASPSPSPKVLWWPWWARWAAESRPCSQPSWLRWTKWRGTWLSRAPWPMCHSRPGFRMILSEKTSFLDVSWRNHITGP

SEQ ID NO: 31074 - protein, 59 aa, Artificial Sequence
  Synthetic polypeptide
NPSTLGGQASPSPSPKVLWWPWWARWAAESRPCSQPSWLRWTKWRGTWLSRRGSWSRTA

SEQ ID NO: 31075 - protein, 26 aa, Artificial Sequence
  Synthetic polypeptide
MSLGLSIHHLSDGSGIKHASIARPAR

SEQ ID NO: 31076 - protein, 275 aa, Artificial Sequence; identical to SEQ ID NO: 13689
  Synthetic polypeptide

SEQ ID NO: 31077 - protein, 23 aa, Artificial Sequence
  Synthetic polypeptide
VTGSLQDGMTTGPPRRRLSGPTR

SEQ ID NO: 31078 - protein, 131 aa, Artificial Sequence
  Synthetic polypeptide
LPIDGDRKPQWSLKRRSADGEEEISGWWEEKCRKSLDFSWKYDSGIRQKPSQTFHRARGGTGTDSATEQTFPERKGPSPSGAEPRLCLPPGPALREPVPGQQHLRQWLPGVPGQWQLGRPRELLRVPGDPQ

SEQ ID NO: 31079 - protein, 171 aa, Artificial Sequence
  Synthetic polypeptide
LPIDGDRKPQWSLKRRSADGEEEISGWWEEKCRKSLDFSWKYDSGIRQKPSQTFHRARGGTGTDSATEQTFPERKGPSPSGAEPRLCLPPGPALREPVPGQQHLRTAVQRIRGPHWHLLAPQPCGAASGSALPCLFLWCPLQYHKQWLPGVPGQWQLGRPRELLRVPGDPQ

SEQ ID NO: 31080 - protein, 20 aa, Artificial Sequence
  Synthetic polypeptide
ALEPGRGSEEAKCSITSCTR

SEQ ID NO: 31081 - protein, 31 aa, Artificial Sequence
  Synthetic polypeptide
AQKVLILCQHEALVKFPQVSEPPSLCCKWSI

SEQ ID NO: 31082 - protein, 33 aa, Artificial Sequence
  Synthetic polypeptide
MAHAYNPSTLGSQAPIKVALDVGRGPTLELRQV

SEQ ID NO: 31083 - protein, 120 aa, Artificial Sequence
  Synthetic polypeptide
MAHAYNPSTLGSQAPIKVALDVGRGPTLELRQVCQGLFNELLENGISVWPGYLETMQSSLEQLYSKYDEMSILFTVLVTETTLENGLIHLRSRDTTMKEMMHISKLKDFLIKYISSAKNV

SEQ ID NO: 31084 - protein, 74 aa, Artificial Sequence
  Synthetic polypeptide
QNYRVRKQELSILTMQVPPCSPRASSKASLVISWKTLMVILTARTSAASSPMTLWSRCATESWRTSTPPQKTTL

SEQ ID NO: 31085 - protein, 60 aa, Artificial Sequence
  Synthetic polypeptide
AACSSLLPVCRVYVCFSKSVLSLLCSFVVLFVRLRIPNSKNLDNLPSRLSIRNKVWLLIL

SEQ ID NO: 31086 - protein, 74 aa, Artificial Sequence
  Synthetic polypeptide
IIIKAPAVLLPVIDGTFSKVLKFSSHSEMVIITTITSNSQGEAARSHPWTPMKMETMEQSKLRSQPCKPAAGAV

SEQ ID NO: 31087 - protein, 17 aa, Artificial Sequence
  Synthetic polypeptide
GQLRPHTWLSIRSTRRY

SEQ ID NO: 31088 - protein, 155 aa, Artificial Sequence
  Synthetic polypeptide
GQLRPHTWLSIRSTRRYEAGPGHSEANLRMFQRAQDDLIPAVDRQFACSSCDHVWWRRVPQRKEVSRCRKCRKRYEPVPADKMWGLAEFHCPKCRHNFRTHTHSCSAADCYNRREPHVPGTSCAHPKSRKQNHLPKVLHPSNPHISSGSTVATCL

SEQ ID NO: 31089 - protein, 56 aa, Artificial Sequence
  Synthetic polypeptide
GQLRPHTWLSIRSTRRYEAGPGHSGSGDLPPATDRSQPTHVSTCPGRPYPCCGPAV

SEQ ID NO: 31090 - protein, 90 aa, Artificial Sequence
  Synthetic polypeptide
GQLRPHTWLSIRSTRRYEAGPGHSGSGDLPPATDRSQPTHVSTCPGRPYPCCGPAVCLLLLRPRLVAPRAPAEGGIPVPEMPEALRASAS

SEQ ID NO: 31091 - protein, 80 aa, Artificial Sequence
  Synthetic polypeptide
NGFFWDSLRLQAEYMAASLGHGGPRWAAPPLSARPRCQKKRVSSWPGRLWRSWTGVWSSWRPCRPIALSARWPRTSSKGC

SEQ ID NO: 31092 - protein, 27 aa, Artificial Sequence
  Synthetic polypeptide
ESFSDFSSSILKRRTNMKKKLNFCLTN

SEQ ID NO: 31093 - protein, 26 aa, Artificial Sequence
  Synthetic polypeptide
SQLLERPRQENRLNLGASRKLSFRSQ

SEQ ID NO: 31094 - protein, 35 aa, Artificial Sequence
  Synthetic polypeptide
SQLLERPRQENRLNLGASRKLSFRSQRTCRRFPRH

SEQ ID NO: 31095 - protein, 37 aa, Artificial Sequence
  Synthetic polypeptide
SQLLERPRQENRLNLGASRKLSFRSQRTCRRFPRHMW

SEQ ID NO: 31096 - protein, 52 aa, Artificial Sequence
  Synthetic polypeptide
SQLLERPRQENRLNLGASRKLSFRSQRTCRRFPRHMWSAPSLSTAVHLASPS

SEQ ID NO: 31097 - protein, 54 aa, Artificial Sequence
  Synthetic polypeptide
SQLLERPRQENRLNLGASRKLSFRSQRTCRRFPRHMWSAPSLSTAVHLASPSSP

SEQ ID NO: 31098 - protein, 25 aa, Artificial Sequence
  Synthetic polypeptide
SFVGAGSSFFFRLDSQYVERFPCHC

SEQ ID NO: 31099 - protein, 339 aa, Artificial Sequence
  Synthetic polypeptide
DLFRATVLFYSYKPKILNLKSDEHIFKFLKAKFGLGATRDFDANLYLCEEAFGLLPFNTFGRLSDTLLFYAYIFVLSITVIVAFVVAFHNLSDSTNQQSVGKMEKGTVDLKPETAYNLIHTILFGFLALSTMRMKYLWTSHMCVFASFGLCSPEIWELLLKSVHLYNPKRICIMRYSVPILILLYLCYKFWPGMMDELSELREFYDPDTVELMNWINSNTPRKAVFAGSMQLLAGVKLCTGRTLTNHPHYEDSSLRERTRAVYQIYAKRAPEEVHALLRSFGTDYVILEDSICYERRHRRGCRLRDLLDIANGHKPSLGTLVTATGAGQGRDDGWPRRE

SEQ ID NO: 31100 - protein, 367 aa, Artificial Sequence
  Synthetic polypeptide
DLFRATVLFYSYKPKILNLKSDEHIFKFLKAKFGLGATRDFDANLYLCEEAFGLLPFNTFGRLSDTLLFYAYIFVLSITVIVAFVVAFHNLSDSTNQQSVGKMEKGTVDLKPETAYNLIHTILFGFLALSTMRMKYLWTSHMCVFASFGLCSPEIWELLLKSVHLYNPKRICIMRYSVPILILLYLCYKFWPGMMDELSELREFYDPDTVELMNWINSNTPRKAVFAGSMQLLAGVKLCTGRTLTNHPHYEDSSLRERTRAVYQIYAKRAPEEVHALLRSFGTDYVILEDSICYERRHRRGCRLRDLLDIANGHMMDGPGENDPDLKPADHPRFCEEIKRNLPPYVAYFTRVFQNKTFHVYKLSRNK

SEQ ID NO: 31101 - protein, 193 aa, Artificial Sequence
  Synthetic polypeptide
DLFRATVLFYSYKPKILNLKSDEHIFKFLKAKFGLGATRDFDANLYLCEEAFGLLPFNTFGRLSDTLLFYAYIFVLSITVIVAFVVAFHNLSDSTNQQSVGKMEKGTVDLKPETAYNLIHTILFGFLALSTMRMKYLWTSHMCVFASFGLCSPEIWELLLKSVHLYNPKRICIMRYSVPILILLYLCYKNQKS

SEQ ID NO: 31102 - protein, 41 aa, Artificial Sequence
  Synthetic polypeptide
KSLLFLLYPWEKIILSLSSRTVKISSEQLFCFTLINPKFLT

SEQ ID NO: 31103 - protein, 192 aa, Artificial Sequence
  Synthetic polypeptide
VTLGISSPVKKTEMDKSPFNSPSPQDSPRLSSFTQHHRPVIAVHSGIARSPHPSSALHFPTTSILPQTASTYFPHTAIRYPPHLNPQDPLKDLVSLACDPASQQPGPLNGSGQLKMPSHCLSAQMLAPPPPGLPRLALPPATKPATTSEGGATSPTSPSYSPPDTSPANRSFVGLGPRDPAGIYQAQSWYLG

SEQ ID NO: 31104 - protein, 123 aa, Artificial Sequence
  Synthetic polypeptide
VTLGISSPVKKTEMDKSPFNSPSPQDSPRLSSFTQHHRPVIAVHSGIARSPHPSSALHFPTTSILPQTASTYFPHTAIRYPPHLNPQDPLKDLVSLACDPASQQPGPPTLRPTRPLQTVPLWD

SEQ ID NO: 31105 - protein, 112 aa, Artificial Sequence
  Synthetic polypeptide
VTLGISSPVKKTEMDKSPFNSPSPQDSPRLSSFTQHHRPVIAVHSGIARSPHPSSALHFPTTSILPQTASTYFPHTAIRYPPHLNPQDPLKDLVSLACDPASQQPGPSWYLG

SEQ ID NO: 31106 - protein, 36 aa, Artificial Sequence; identical to SEQ ID NO: 15662
  Synthetic polypeptide

SEQ ID NO: 31107 - protein, 96 aa, Artificial Sequence
  Synthetic polypeptide
ARHGSSHLSSQHFGRPRQADHEVRSSRPAWPTWCLPPGPGRAEPVARYSCRPWATTWPPSSFPRPSGRAGQHRAPDPLSPGGHAAAGCTAEGQIPS

SEQ ID NO: 31108 - protein, 13 aa, Artificial Sequence
  Synthetic polypeptide
AEIAPLNSSLGRS

SEQ ID NO: 31109 - protein, 90 aa, Artificial Sequence
  Synthetic polypeptide
SQQLGRLRQENRLNPGGGGCSELRWRHGTPAWLIQVLLEDETTESAVKLSLPMGQEALITLKDGQQFVIQISDVPQSSEDIYFRENNANV

SEQ ID NO: 31110 - protein, 416 aa, Artificial Sequence
  Synthetic polypeptide
TQGGSMGNSSSSRYTKLGYAGNTEPQFIIPSCIAIKESAKVGDQAQRRVMKGVDDLDFFIGDEAIEKPTYATKWPIRHGIVEDWDLMERFMEQVIFKYLRAEPEDHYFLLTEPPLNTPENREYTAEIMFESFNVPGLYIAVQAVLALAASWTSRQVGERTLTGTVIDSGDGVTHVIPVAEGYVIGSCIKHIPIAGRDITYFIQQLLRDREVGIPPEQSLETAKAVKERYSYVCPDLVKEFNKYDTDGSKWIKQYTGINAISKKEFSIDVGYERFLGPEIFFHPEFANPDFTQPISEVVDEVIQNCPIDVRRPLYKNIVLSGGSTMFRDFGRRLQRDLKRTVDARLKLSEELSGGRLKPKPIDVQVITHHMQRYAVWFGGSMLASTPEFYQVCHTKKDYEEIGPSICRHNPVFGVMS

SEQ ID NO: 31111 - protein, 39 aa, Artificial Sequence
  Synthetic polypeptide
TQGGSMGNSSSSRYTKLGYAGNTEPQFIIPSLANPPWYS

SEQ ID NO: 31112 - protein, 32 aa, Artificial Sequence
  Synthetic polypeptide
TQGGSMGNSSSSRYTKLGYAGNTEPQFIIPSY

SEQ ID NO: 31113 - protein, 106 aa, Artificial Sequence
  Synthetic polypeptide
VCNKNFDDEDSVDGNRPSSASSTSSKAPPSSRRNVGMGTTRRLGSSTLGSKSSAAKEGAGAVDEEDFIKAFDDVPVVQIYSSRDLEESINKIREILSDDKHDWEQR

SEQ ID NO: 31114 - protein, 146 aa, Artificial Sequence
  Synthetic polypeptide
VCNKNFDDEDSVDGNRPSSASSTSSKAPPSSRRNVGMGTTRRLGSSTLGSKSSAAKEGAGAVDEEDFIKAFDDVPVVQIYSSRDLEESINKIREILSDDKHDWEQRVNALKKIRSLLLAGAAEYDNFFQHLRLLDGAFKLSAKDLR

SEQ ID NO: 31115 - protein, 1243 aa, Artificial Sequence
  Synthetic polypeptide
VCNKNFDDEDSVDGNRPSSASSTSSKAPPSSRRNVGMGTTRRLGSSTLGSKSSAAKEGAGAVDEEDFIKAFDDVPVVQIYSSRDLEESINKIREILSDDKHDWEQRVNALKKIRSLLLAGAAEYDNFFQHLRLLDGAFKLSAKDLRSQVVREACITLGHLSSVLGNKFDHGAEAIMPTIFNLIPNSAKIMATSGVVAVRLIIRHTHIPRLIPVITSNCTSKSVAVRRRCFEFLDLLLQEWQTHSLERHISVLAETIKKGIHDADSEARIEARKCYWGFHSHFSREAEHLYHTLESSYQKALQSHLKNSDSIVSLPQSDRSSSSSQESLNRPLSAKRSPTGSTTSRASTVSTKSVSTTGSLQRSRSDIDVNAAASAKSKVSSSSGTTPFSSAAALPPGSYASLDGTTTKAEGRIRTRRQSSGSATNVASTPDNRGRSRAKVVSQSQRSRSANPAGAGSRSSSPGKLLGSGYGGLTGGSSRGPPVTPSSEKRSKIPRSQGCSRETSPNRIGLDRFGLGQPGRIPGSVNAMRVLSTSTDLEAAVADALLLGDSRSKKKPVRRRYEPYGMYSDDDANSDASSVCSERSYGSRNGGIPHYLRQTEDVAEVLNHCASSNWSERKEGLLGLQNLLKSQRTLSRVELKRLCEIFTRMFADPHSKVFSMFLETLVDFIIIHKDDLQDWLFVLLTQLLKKMGADLLGSVQAKVQKALDVTRDSFPFDQQFNILMRFIVDQTQTPNLKVKVAILKYIESLARQMDPTDFVNSSETRLAVSRIITWTTEPKSSDVRKAAQIVLISLFELNTPEFTMLLGALPKTFQDGATKLLHNHLKNSSNTSVGSPSNTIGRTPSRHTSSRTSPLTSPTNCSHGGLSPSMLDYDTENLNSEEIYSSLRGVTEAIEKFSFRSQEDLNEPIKRDGKKECDIVSRDGGAASPATEGRGGSEVEGGRTALDNKTSLLNTQPPRAFPGPRARDYNPYPYSDAINTYDKTALKEAVFDDDMEQLRDVPIDHSDLVADLLKELSNHNERVEERKGALLELLKITREDSLGVWEEHFKTILLLLLETLGDKDHSIRALALRVLREILRNQPARFKNYAELTIMKTLEAHKDSHKEVVRAAEEAASTLASSIHPEQCIKVLCPIIQTADYPINLAAIKMQTKVVERIAKESLLQLLVDIIPGLLQGYDNTESSVRKASVFCLVAIYSVIGEDLKPHLAQLTGSKMKLLNLYIKRAQTTNSNSSSSSDVSTHS

SEQ ID NO: 31116 - protein, 1242 aa, Artificial Sequence
  Synthetic polypeptide
VCNKNFDDEDSVDGNRPSSASSTSSKAPPSSRRNVGMGTTRRLGSSTLGSKSSAAKEGAGAVDEEDFIKAFDDVPVVQIYSSRDLEESINKIREILSDDKHDWEQRVNALKKIRSLLLAGAAEYDNFFQHLRLLDGAFKLSAKDLRSQVVREACITLGHLSSVLGNKFDHGAEAIMPTIFNLIPNSAKIMATSGVVAVRLIIRHTHIPRLIPVITSNCTSKSVAVRRRCFEFLDLLLQEWQTHSLERHISVLAETIKKGIHDADSEARIEARKCYWGFHSHFSREAEHLYHTLESSYQKALQSHLKNSDSIVSLPQSDRSSSSSQESLNRPLSAKRSPTGSTTSRASTVSTKSVSTTGSLQRSRSDIDVNAAASAKSKVSSSSGTTPFSSAAALPPGSYASLDGTTTKAEGRIRTRRQSSGSATNVASTPDNRGRSRAKVVSQSQRSRSANPAGAGSRSSSPGKLLGSGYGGLTGGSSRGPPVTPSSEKRSKIPRSQGCSRETSPNRIGLDRFGLGQPGRIPGSVNAMRVLSTSTDLEAAVADALLLGDSRSKKPVRRRYEPYGMYSDDDANSDASSVCSERSYGSRNGGIPHYLRQTEDVAEVLNHCASSNWSERKEGLLGLQNLLKSQRTLSRVELKRLCEIFTRMFADPHSKVFSMFLETLVDFIIIHKDDLQDWLFVLLTQLLKKMGADLLGSVQAKVQKALDVTRDSFPFDQQFNILMRFIVDQTQTPNLKVKVAILKYIESLARQMDPTDFVNSSETRLAVSRIITWTTEPKSSDVRKAAQIVLISLFELNTPEFTMLLGALPKTFQDGATKLLHNHLKNSSNTSVGSPSNTIGRTPSRHTSSRTSPLTSPTNCSHGGLSPSMLDYDTENLNSEEIYSSLRGVTEAIEKFSFRSQEDLNEPIKRDGKKECDIVSRDGGAASPATEGRGGSEVEGGRTALDNKTSLLNTQPPRAFPGPRARDYNPYPYSDAINTYDKTALKEAVFDDDMEQLRDVPIDHSDLVADLLKELSNHNERVEERKGALLELLKITREDSLGVWEEHFKTILLLLLETLGDKDHSIRALALRVLREILRNQPARFKNYAELTIMKTLEAHKDSHKEVVRAAEEAASTLASSIHPEQCIKVLCPIIQTADYPINLAAIKMQTKVVERIAKESLLQLLVDIIPGLLQGYDNTESSVRKASVFCLVAIYSVIGEDLKPHLAQLTGSKMKLLNLYIKRAQTTNSNSSSSSDVSTHS

SEQ ID NO: 31117 - protein, 1242 aa, Artificial Sequence
  Synthetic polypeptide
VCNKNFDDEDSVDGNRPSSASSTSSKAPPSSRRNVGMGTTRRLGSSTLGSKSSAAKEGAGAVDEEDFIKAFDDVPVVQIYSSRDLEESINKIREILSDDKHDWEQRVNALKKIRSLLLAGAAEYDNFFQHLRLLDGAFKLSAKDLRSQVVREACITLGHLSSVLGNKFDHGAEAIMPTIFNLIPNSAKIMATSGVVAVRLIIRHTHIPRLIPVITSNCTSKSVAVRRRCFEFLDLLLQEWQTHSLERHISVLAETIKKGIHDADSEARIEARKCYWGFHSHFSREAEHLYHTLESSYQKALQSHLKNSDSIVSLPQSDRSSSSSQESLNRPLSAKRSPTGSTTSRASTVSTKSVSTTGSLQRSRSDIDVNAAASAKSKVSSSSGTTPFSSAAALPPGSYASLESRHMREDMEYIGLDSGRIRTRRQSSGSATNVASTPDNRGRSRAKVVSQSQPGSRSSSPGKLLGSGYGGLTGGSSRGPPVTPSSEKRSKIPRSQGCSRETSPNRIGLDRFGLGQPGRIPGSVNAMRVLSTSTDLEAAVADALLLGDSRSKKPVRRRYEPYGMYSDDDANSDASSVCSERSYGSRNGGIPHYLRQTEDVAEVLNHCASSNWSERKEGLLGLQNLLKSQRTLSRVELKRLCEIFTRMFADPHSKRVFSMFLETLVDFIIIHKDDLQDWLFVLLTQLLKKMGADLLGSVQAKVQKALDVTRDSFPFDQQFNILMRFIVDQTQTPNLKVKVAILKYIESLARQMDPTDFVNSSETRLAVSRIITWTTEPKSSDVRKAAQIVLISLFELNTPEFTMLLGALPKTFQDGATKLLHNHLKNSSNTSVGSPSNTIGRTPSRHTSSRTSPLTSPTNCSHGGLSPSMLDYDTENLNSEEIYSSLRGVTEAIEKFSFRSQEDLNEPIKRDGKKECDIVSRDGGAASPATEGRGGSEVEGGRTALDNKTSLLNTQPPRAFPGPRARDYNPYPYSDAINTYDKTALKEAVFDDDMEQLRDVPIDHSDLVADLLKELSNHNERVEERKGALLELLKITREDSLGVWEEHFKTILLLLLETLGDKDHSIRALALRVLREILRNQPARFKNYAELTIMKTLEAHKDSHKEVVRAAEEAASTLASSIHPEQCIKVLCPIIQTADYPINLAAIKMQTKVVERIAKESLLQLLVDIIPGLLQGYDNTESSVRKASVFCLVAIYSVIGEDLKPHLAQLTGSKMKLLNLYIKRAQTTNSNSSSSSDVSTHS

SEQ ID NO: 31118 - protein, 1303 aa, Artificial Sequence
  Synthetic polypeptide
VCNKNFDDEDSVDGNRPSSASSTSSKAPPSSRRNVGMGTTRRLGSSTLGSKSSAAKEGAGAVDEEDFIKAFDDVPVVQIYSSRDLEESINKIREILSDDKHDWEQRVNALKKIRSLLLAGAAEYDNFFQHLRLLDGAFKLSAKDLRSQVVREACITLGHLSSVLGNKFDHGAEAIMPTIFNLIPNSAKIMATSGVVAVRLIIRHTHIPRLIPVITSNCTSKSVAVRRRCFEFLDLLLQEWQTHSLERHISVLAETIKKGIHDADSEARIEARKCYWGFHSHFSREAEHLYHTLESSYQKALQSHLKNSDSIVSLPQSDRSSSSSQESLNRPLSAKRSPTGSTTSRASTVSTKSVSTTGSLQRSRSDIDVNAAASAKSKVSSSSGTTPFSSAAALPPGSYASLGRIRTRRQSSGSATNVASTPDNRGRSRAKVVSQSQRSRSANPAGAGSRSSSPGKLLGSGYGGLTGGSSRGPPVTPSSEKRSKIPRSQGCSRETSPNRIGLARSSRIPRPSMSQGCSRDTSRESSRDTSPARGFPPLDRFGLGQPGRIPGSVNAMRVLSTSTDLEAAVADALKKPVRRRYEPYGMYSDDDANSDASSVCSERSYGSRNGGIPHYLRQTEDVAEVLNHCASSNWSERKEGLLGLQNLLKSQRTLSRVELKRLCEIFTRMFADPHSKRVFSMFLETLVDFIIIHKDDLQDWLFVLLTQLLKKMGADLLGSVQAKVQKALDVTRDSFPFDQQFNILMRFIVDQTQTPNLKVKVAILKYIESLARQMDPTDFVNSSETRLAVSRIITWTTEPKSSDVRKAAQIVLISLFELNTPEFTMLLGALPKTFQDGATKLLHNHLKNSSNTSVGSPSNTIGRTPSRHTSSRTSPLTSPTNCSHGGLSPSRLWGWSADGLAKHPPPFSQPNSIPTAPSHKALRRSYSPSMLDYDTENLNSEEIYSSLRGVTEAIEKFSFRSQEDLNEPIKRDGKKECDIVSRDGGAASPATEGRGGSEVEGGRTALDNKTSLLNTQPPRAFPGPRARDYNPYPYSDAINTYDKTALKEAVFDDDMEQLRDVPIDHSDLVADLLKELSNHNERVEERKGALLELLKITREDSLGVWEEHFKTILLLLLETLGDKDHSIRALALRVLREILRNQPARFKNYAELTIMKTLEAHKDSHKEVVRAAEEAASTLASSIHPEQCIKVLCPIIQTADYPINLAAIKMQTKVVERIAKESLLQLLVDIIPGLLQGYDNTESSVRKASVFCLVAIYSVIGEDLKPHLAQLTGSKMKLLNLYIKRAQTTNSNSSSSSDVSTHS

SEQ ID NO: 31119 - protein, 1251 aa, Artificial Sequence
  Synthetic polypeptide
VCNKNFDDEDSVDGNRPSSASSTSSKAPPSSRRNVGMGTTRRLGSSTLGSKSSAAKEGAGAVDEEDFIKAFDDVPVVQIYSSRDLEESINKIREILSDDKHDWEQRVNALKKIRSLLLAGAAEYDNFFQHLRLLDGAFKLSAKDLRSQVVREACITLGHLSSVLGNKFDHGAEAIMPTIFNLIPNSAKIMATSGVVAVRLIIRHTHIPRLIPVITSNCTSKSVAVRRRCFEFLDLLLQEWQTHSLERHISVLAETIKKGIHDADSEARIEARKCYWGFHSHFSREAEHLYHTLESSYQKALQSHLKNSDSIVSLPQSDRSSSSSQESLNRPLSAKRSPTGSTTSRASTVSTKSVSTTGSLQRSRSDIDVNAAASAKSKVSSSSGTTPFSSAAALPPGSYASLGRIRTRRQSSGSATNVASTPDNRGRSRAKVVSQSQRSRSANPAGAGSRSSSPGKLLGSGYGGLTGGSSRGPPVTPSSEKRSKIPRSQGCSRETSPNRIGLDRFGLGQPGRIPGSVNAMRVLSTSTDLEAAVADALKKPVRRRYEPYGMYSDDDANSDASSVCSERSYGSRNGGIPHYLRQTEDVAEVLNHCASSNWSERKEGLLGLQNLLKSQRTLSRVELKRLCEIFTRMFADPHSKIADSEAECEDKEGNLFPSEVSCTRVFSMFLETLVDFIIIHKDDLQDWLFVLLTQLLKKMGADLLGSVQAKVQKALDVTRDSFPFDQQFNILMRFIVDQTQTPNLKVKVAILKYIESLARQMDPTDFVNSSETRLAVSRIITWTTEPKSSDVRKAAQIVLISLFELNTPEFTMLLGALPKTFQDGATKLLHNHLKNSSNTSVGSPSNTIGRTPSRHTSSRTSPLTSPTNCSHGGLSPSMLDYDTENLNSEEIYSSLRGVTEAIEKFSFRSQEDLNEPIKRDGKKECDIVSRDGGAASPATEGRGGSEVEGGRTALDNKTSLLNTQPPRAFPGPRARDYNPYPYSDAINTYDKTALKEAVFDDDMEQLRDVPIDHSDLVADLLKELSNHNERVEERKGALLELLKITREDSLGVWEEHFKTILLLLLETLGDKDHSIRALALRVLREILRNQPARFKNYAELTIMKTLEAHKDSHKEVVRAAEEAASTLASSIHPEQCIKVLCPIIQTADYPINLAAIKMQTKVVERIAKESLLQLLVDIIPGLLQGYDNTESSVRKASVFCLVAIYSVIGEDLKPHLAQLTGSKMKLLNLYIKRAQTTNSNSSSSSDVSTHS

SEQ ID NO: 31120 - protein, 688 aa, Artificial Sequence
  Synthetic polypeptide
VCNKNFDDEDSVDGNRPSSASSTSSKAPPSSRRNVGMGTTRRLGSSTLGSKSSAAKEGAGAVDEEDFIKAFDDVPVVQIYSSRDLEESINKIREILSDDKHDWEQRVNALKKIRSLLLAGAAEYDNFFQHLRLLDGAFKLSAKDLRSQVVREACITLGHLSSVLGNKFDHGAEAIMPTIFNLIPNSAKIMATSGVVAVRLIIRHTHIPRLIPVITSNCTSKSVAVRRRCFEFLDLLLQEWQTHSLERHISVLAETIKKGIHDADSEARIEARKCYWGFHSHFSREAEHLYHTLESSYQKALQSHLKNSDSIVSLPQSDRSSSSSQESLNRPLSAKRSPTGSTTSRASTVSTKSVSTTGSLQRSRSDIDVNAAASAKSKVSSSSGTTPFSSAAALPPGSYASLGRIRTRRQSSGSATNVASTPDNRGRSRAKVVSQSQRSRSANPAGAGSRSSSPGKLLGSGYGGLTGGSSRGPPVTPSSEKRSKIPRSQGCSRETSPNRIGLDRFGLGQPGRIPGSVNAMRVLSTSTDLEAAVADALLLGDSRSKKKPVRRRYEPYGMYSDDDANSDASSVCSERSYGSRNGGIPHYLRQTEDVAEVLNHCASSNWSERKEGLLGLQNLLKSQRTLSRVELKRLCEIFTRMFADPHSKIADSEAECEDKEGNLFPSEVSCTVSFQYVFGDSCGFYNNS

SEQ ID NO: 31121 - protein, 1236 aa, Artificial Sequence
  Synthetic polypeptide
VCNKNFDDEDSVDGNRPSSASSTSSKAPPSSRRNVGMGTTRRLGSSTLGSKSSAAKEGAGAVDEEDFIKAFDDVPVVQIYSSRDLEESINKIREILSDDKHDWEQRVNALKKIRSLLLAGAAEYDNFFQHLRLLDGAFKLSAKDLRSQVVREACITLGHLSSVLGNKFDHGAEAIMPTIFNLIPNSAKIMATSGVVAVRLIIRHTHIPRLIPVITSNCTSKSVAVRRRCFEFLDLLLQEWQTHSLERHISVLAETIKKGIHDADSEARIEARKCYWGFHSHFSREAEHLYHTLESSYQKALQSHLKNSDSIVSLPQSDRSSSSSQESLNRPLSAKRSPTGSTTSRASTVSTKSVSTTGSLQRSRSDIDVNAAASAKSKVSSSSGTTPFSSAAALPPGSYASLGRIRTRRQSSGSATNVASTPDNRGRSRAKVVSQSQRSRSANPAGAGSRSSSPGKLLGSGYGGLTGGSSRGPPVTPSSEKRSKIPRSQGCSRETSPNRIGLDRFGLGQPGRIPGSVNAMRVLSTSTDLEAAVADALLLGDSRSKKKPVRRRYEPYGMYSDDDANSDASSVCSERSYGSRNGGIPHYLRQTEDVAEVLNHCASSNWSERKEGLLGLQNLLKSQRTLSRVELKRLCEIFTRMFADPHSKRVFSMFLETLVDFIIIHKDDLQDWLFVLLTQLLKKMGADLLGSVQAKVQKALDVTRDSFPFDQQFNILMRFIVDQTQTPNLKVKVAILKYIESLARQMDPTDFVNSSETRLAVSRIITWTTEPKSSDVRKAAQIVLISLFELNTPEFTMLLGALPKTFQDGATKLLHNHLKNSSNTSVGSPSNTIGRTPSRHTSSRTSPLTSPTNCSHGGLSPSMLDYDTENLNSEEIYSSLRGVTEAIEKFSFRSQEDLNEPIKRDGKKECDIVSRDGGAASPATEGRGGSEVEGGRTALDNKTSLLNTQPPRAFPGPRARDYNPYPYSDAINTYDKTALKEAVFDDDMEQLRDVPIDHSDLVADLLKELSNHNERVEERKGALLELLKITREDSLGVWEEHFKTILLLLLETLGDKDHSIRALALRVLREILRNQPARFKNYAELTIMKTLEAHKDSHKEVVRAAEEAASTLASSIHPEQCIKVLCPIIQTADYPINLAAIKMQTKVVERIAKESLLQLLVDIIPGLLQGYDNTESSVRKASVFCLVAIYSVIGEDLKPHLAQLTGSKMKLLNLYIKRAQTTNSNSSSSSDVSTHS

SEQ ID NO: 31122 - protein, 1259 aa, Artificial Sequence
  Synthetic polypeptide
VCNKNFDDEDSVDGNRPSSASSTSSKAPPSSRRNVGMGTTRRLGSSTLGSKSSAAKEGAGAVDEEDFIKAFDDVPVVQIYSSRDLEESINKIREILSDDKHDWEQRVNALKKIRSLLLAGAAEYDNFFQHLRLLDGAFKLSAKDLRSQVVREACITLGHLSSVLGNKFDHGAEAIMPTIFNLIPNSAKIMATSGVVAVRLIIRHTHIPRLIPVITSNCTSKSVAVRRRCFEFLDLLLQEWQTHSLERHISVLAETIKKGIHDADSEARIEARKCYWGFHSHFSREAEHLYHTLESSYQKALQSHLKNSDSIVSLPQSDRSSSSSQESLNRPLSAKRSPTGSTTSRASTVSTKSVSTTGSLQRSRSDIDVNAAASAKSKVSSSSGTTPFSSAAALPPGSYASLGRIRTRRQSSGSATNVASTPDNRGRSRAKVVSQSQRSRSANPAGAGSRSSSPGKLLGSGYGGLTGGSSRGPPVTPSSEKRSKIPRSQGCSRETSPNRIGLDRFGLGQPGRIPGSVNAMRVLSTSTDLEAAVADALVRGTSTGKKKPVRRRYEPYGMYSDDDANSDASSVCSERSYGSRNGGIPHYLRQTEDVAEVLNHCASSNWSERKEGLLGLQNLLKSQRTLSRVELKRLCEIFTRMFADPHSKIADSEAECEDKEGNLFPSEVSCTRVFSMFLETLVDFIIIHKDDLQDWLFVLLTQLLKKMGADLLGSVQAKVQKALDVTRDSFPFDQQFNILMRFIVDQTQTPNLKVKVAILKYIESLARQMDPTDFVNSSETRLAVSRIITWTTEPKSSDVRKAAQIVLISLFELNTPEFTMLLGALPKTFQDGATKLLHNHLKNSSNTSVGSPSNTIGRTPSRHTSSRTSPLTSPTNCSHGGLSPSMLDYDTENLNSEEIYSSLRGVTEAIEKFSFRSQEDLNEPIKRDGKKECDIVSRDGGAASPATEGRGGSEVEGGRTALDNKTSLLNTQPPRAFPGPRARDYNPYPYSDAINTYDKTALKEAVFDDDMEQLRDVPIDHSDLVADLLKELSNHNERVEERKGALLELLKITREDSLGVWEEHFKTILLLLLETLGDKDHSIRALALRVLREILRNQPARFKNYAELTIMKTLEAHKDSHKEVVRAAEEAASTLASSIHPEQCIKVLCPIIQTADYPINLAAIKMQTKVVERIAKESLLQLLVDIIPGLLQGYDNTESSVRKASVFCLVAIYSVIGEDLKPHLAQLTGSKMKLLNLYIKRAQTTNSNSSSSSDVSTHS

SEQ ID NO: 31123 - protein, 20 aa, Artificial Sequence
  Synthetic polypeptide
STNVLCTLFMLNLPDLEEKV

SEQ ID NO: 31124 - protein, 115 aa, Artificial Sequence
  Synthetic polypeptide
LKIIKLSVLSQPKAAPSVTLFPPSSEELQANKATLVCLISDFYPGAVTVAWKADSSPVKAGVETTTPSKQSNNKYAASSYLSLTPEQWKSHRSYSCQVTHEGSTVEKTVAPTECS

SEQ ID NO: 31125 - protein, 40 aa, Artificial Sequence
  Synthetic polypeptide
AVALYEGTLSLCSEDLKHTHPDSVKSKRSRLNHVASCGNP

SEQ ID NO: 31126 - protein, 40 aa, Artificial Sequence
  Synthetic polypeptide
RQLWTLIGMEMVPEESTLTSLGIKACGFHRSTTYHICHTN

SEQ ID NO: 31127 - protein, 64 aa, Artificial Sequence
  Synthetic polypeptide
GSLPTRIKCFAYKIKKIKAASNQISGVPSRFSGSGSGTEFTLTISSLQPDDFATYYCQQYNSYS

SEQ ID NO: 31128 - protein, 44 aa, Artificial Sequence
  Synthetic polypeptide
SNLNTGVPSRFSGSGSGTDYTLTISSLQPEDFATYYCQQYYSTP

SEQ ID NO: 31129 - protein, 44 aa, Artificial Sequence
  Synthetic polypeptide
SNLNTGVPSRFSGSGSGTDFTLTISCLQSEDFATYYCQQYYSFP

SEQ ID NO: 31130 - protein, 48 aa, Artificial Sequence; identical to SEQ ID NO: 18740
  Synthetic polypeptide

SEQ ID NO: 31131 - protein, 54 aa, Artificial Sequence
  Synthetic polypeptide
DLGQVISLDLHIFICEVSRVPMIRSQNCCQLGGTTIKTCMSSGMSIRMGPESSL

SEQ ID NO: 31132 - protein, 76 aa, Artificial Sequence
  Synthetic polypeptide
GNPRGSPGIAARHPSFRPAMTVWVGKWCENFGCGTWRRRNTKWGSALGVVSTADAQQSHCLVHIPEGSLRLSRHRS

SEQ ID NO: 31133 - protein, 641 aa, Artificial Sequence
  Synthetic polypeptide
FVSDEMSKDCLSILYNTCVCTEGVTKRLAEKNDFVIFLFTLMTSKKTFLQTATLIEDILGVKKEMIRLDEVPNLSSLVSNFDQQQLANFCRILAVTISEMDTGNDDKHTLLAKNAQQKKSLSLGPSAAEINQAALLSIPGFVERLCKLATRKVSESTGTASFLQELEEWYTWLDNALVLDALMRVANEESEHNQASIVFPPPGASEENGLPHTSARTQLPQSMKIMHEIMYKLEVLYVLCVLLMGRQRNQVHRMIAEFKLIPGLNNLFDKLIWRKHSASALVLHGHNQNCDCSPDITLKIQFLRLLQSFSDHHENKYLLLNNQELNELSAISLKANIPEVEAVLNTDRSLVCDGKRGLLTRLLQVMKKEPAESSFRFWQARAVESFLRGTTSYADQMFLLKRGLLEHILYCIVDSECKSRDVLQSYFDLLGELMKFNVDAFKRFNKYINTDAKFQVFLKQINSSLVDSNMLVRCVTLSLDRFENQVDMKVAEVLSECRLLAYISQVPTQMSFLFRLINIIHVQTLTQENVSCLNTSLVILMLARRKERLPLYLRLLQRMEHSKKYPGFLLNNFHNLLRFWQQHYLHKDKDSTCLENSSCISFSYWKETVSILLNPDRQSPSALVSYIEEPYMDIDRDFTEE

SEQ ID NO: 31134 - protein, 633 aa, Artificial Sequence
  Synthetic polypeptide
FVSDEMSKDCLSILYNTCVCTEGVTKRLAEKNDFVIFLFTLMTSKKTFLQTATLIEDILGVKKEMIRLDEVPNLSSLVSNFDQQQLANFCRILAVTISEMDTGNDDKHTLLAKNAQQKKSLSLGPSAAEINQAALLSIPGFVERLCKLATRKVSESTGTASFLQELEEWYTWLDNALVLDALMRVANEESEHNQGASEENGLPHTSARTQLPQSMKIMHEIMYKLEVLYVLCVLLMGRQRNQVHRMIAEFKLIPGLNNLFDKLIWRKHSASALVLHGHNQNCDCSPDITLKIQFLRLLQSFSDHHENKYLLLNNQELNELSAISLKANIPEVEAVLNTDRSLVCDGKRGLLTRLLQVMKKEPAESSFRFWQARAVESFLRGTTSYADQMFLLKRGLLEHILYCIVDSECKSRDVLQSYFDLLGELMKFNVDAFKRFNKYINTDAKFQVFLKQINSSLVDSNMLVRCVTLSLDRFENQVDMKVAEVLSECRLLAYISQVPTQMSFLFRLINIIHVQTLTQENVSCLNTSLVILMLARRKERLPLYLRLLQRMEHSKKYPGFLLNNFHNLLRFWQQHYLHKDKDSTCLENSSCISFSYWKETVSILLNPDRQSPSALVSYIEEPYMDIDRDFTEE

SEQ ID NO: 31135 - protein, 442 aa, Artificial Sequence
  Synthetic polypeptide
LGGSSCLVAYKKTPPPVPPRTTSKPFISVTVQSSTESAQDTYLDSQDHKSEVTSQSGLSNSSDSLDSSTRPPSVTRGGVAPAPEAPEPPPKHAALKSEQGTLTSSESHPEAAPKRKLSSIGIQERTRRNGSHLSEDNGPKAIDVMAPSSESSVPSHSMSSRRDTDSDTQDANDSSCKSSERSLPDCTPHPNSISIDAGPRQAPKIAQIKRNLSYGDNSDPALEASSLPPPDPWLETSSSSPAEPAQPGACRRDGYWFLKLLQAETERLEGWCCQMDKETKENNLSEEVLGKVLSAVGSAQLLMSQKFQQFRGLCEQNLNPDANPRPTAQDLAGFWDLLQLSIEDISMKFDELYHLKANSWQLVETPEKRKEEKKPPPPVPKKPAKSKPAVSRDKASDASDKQRQEARKRLLAAKRAASVRQNSATESADSIEIYVPEAQTRL

SEQ ID NO: 31136 - protein, 445 aa, Artificial Sequence
  Synthetic polypeptide
LGGSSCLVAYKKTPPPVPPRTTSKPFISVTVQSSTESAQDTYLDSQDHKSEVTSQSGLSNSSDSLDSSTRPPSVTRGGVAPAPEAPEPPPKHAALKSEQGTLTSSESHPEAAPKRKLSSIGIQVDCIQPVPKEEPSPATKFQSIGVQVEDDWRSSVPSHSMSSRRDTDSDTQDANDSSCKSSERSLPDCTPHPNSISIDAGPRQAPKIAQIKRNLSYGDNSDPALEASSLPPPDPWLETSSSSPAEPAQPGACRRDGYWFLKLLQAETERLEGWCCQMDKETKENNLSEEVLGKVLSAVGSAQLLMSQKFQQFRGLCEQNLNPDANPRPTAQDLAGFWDLLQLSIEDISMKFDELYHLKANSWQLVETPEKRKEEKKPPPPVPKKPAKSKPAVSRDKASDASDKQRQEARKRLLAAKRAASVRQNSATESADSIEIYVPEAQTRL

SEQ ID NO: 31137 - protein, 78 aa, Artificial Sequence; identical to SEQ ID NO: 19105
  Synthetic polypeptide

SEQ ID NO: 31138 - protein, 31 aa, Artificial Sequence
  Synthetic polypeptide
QPPRPNQLCRRKVQRLVKYILALKELSTQNL

SEQ ID NO: 31139 - protein, 22 aa, Artificial Sequence
  Synthetic polypeptide
RTFTGGAVIVQKFWWACALLAV

SEQ ID NO: 31140 - protein, 55 aa, Artificial Sequence; identical to SEQ ID NO: 20134
  Synthetic polypeptide

SEQ ID NO: 31141 - protein, 76 aa, Artificial Sequence
  Synthetic polypeptide
KTHSQHHTEWAKAGSIHFENHHKTRMPSLNTSRPSGVPDRFSGSKSGTSASLAISGLRSEDEADYYCAAWDDSLSG

SEQ ID NO: 31142 - protein, 76 aa, Artificial Sequence
  Synthetic polypeptide
KTHSQHHTEWAKAGSIHFENHHKTRMPSLNTSRPSGVPDRFSGSKSGTSASLAISGLQSEDEADYYCAAWDDSLNG

SEQ ID NO: 31143 - protein, 10 aa, Artificial Sequence
  Synthetic polypeptide
MTKLLSPIRM

SEQ ID NO: 31144 - protein, 139 aa, Artificial Sequence
  Synthetic polypeptide
QFWNHFVCIVEETEADVNPKAYPLADAHLTKKLLDLVQQSCNYKQLRKGANEATKTLNRGISEFIVMAADAEPLEIILHLPLLCEDKNVPYVFVRSKQALGRACGVSRPVIACSVTIKEGSQLKQQIQSIQQSIERLLV

SEQ ID NO: 31145 - protein, 17 aa, Artificial Sequence
  Synthetic polypeptide
RDIVRSDLEGKRVKEGL

SEQ ID NO: 31146 - protein, 549 aa, Artificial Sequence
  Synthetic polypeptide
MGAVAQACNPSTLGGQGKPAPEIRCPIPAFPDSVKPEKPLAASVRKAEDEQEEGQPVRMATFPGPGSSPARAHQPAFLQPPEEDAPHSLRSDLPTSSDSKDFSTSIPKQEKLLSLAGDSLFWSEADVVQATDDFNQNRKISQGTFADVYRGHRHGKPFVFKKLRETACSSPGSIERFFQAELQICLRCCHPNVLPVLGFCAARQFHSFIYPYMANGSLQDRLQGQGGSDPLPWPQRVSICSGLLCAVEYLHGLEIIHSNVKSSNVLLDQNLTPKLAHPMAHLCPVNKRSKYTMMKTHLLRTSAAYLPEDFIRVGQLTKRVDIFSCGIVLAEVLTGIPAMDNNRSPVYLKDLLLSDIPSSTASLCSRKTGVENVMAKEICQKYLEKGAGRLPEDCAEALATAACLCLRRRNTSLQEVCGSVAAVEERLRGRETLLPWSGLSEGTGSSSNTPEETDDVDNSSLDASSSMSVAPWAGAATPLLPTENGEGRLRVIVGREADSSSEACVGLEPPQDVTETSWQIEINEAKRKLMENILLYKEEKVDSIELFGP

SEQ ID NO: 31147 - protein, 98 aa, Artificial Sequence
  Synthetic polypeptide
GRSQDGRIGTAPVYSSQCERHRRQVLQHPWKCQRALGVSRWPGVSQQSCPALSLPALPSLTSMSFGWSLLSPMPTNLNRSSCIRVDRCLMVPPGSTVG

SEQ ID NO: 31148 - protein, 84 aa, Artificial Sequence
  Synthetic polypeptide
FLLSKRKNFRVRHCTVPSIWRAASITPALGGSRLLITTSAGGRHFPPSTCGPGSCRPWLASSMPRPLWPTTSTLSTCCGPHPGS

SEQ ID NO: 31149 - protein, 29 aa, Artificial Sequence
  Synthetic polypeptide
KYKKKIFRACLAEGRHQYKMGSHTMGQED

SEQ ID NO: 31150 - protein, 14 aa, Artificial Sequence
  Synthetic polypeptide
ASVTLIRIIQIINS

SEQ ID NO: 31151 - protein, 12 aa, Artificial Sequence
  Synthetic polypeptide
HRRQISTAMPVK

SEQ ID NO: 31152 - protein, 20 aa, Artificial Sequence
  Synthetic polypeptide
HRRQVISAFPTEISTAMPVK

SEQ ID NO: 31153 - protein, 51 aa, Artificial Sequence; identical to SEQ ID NO: 22019
  Synthetic polypeptide

SEQ ID NO: 31154 - protein, 792 aa, Artificial Sequence
  Synthetic polypeptide
DHPGQHGETKISWAWWRMPVVPATREAEAGESLESDAVKQAMQKHLLQGWLRFSEGNILELLHRLDVENSSEVAVSVLNALFSITPLSELVGLCKNNDGRKLIPVETLTPEIALYWCALCEYLKSKGDEGEEFLEQILPEPVVYADYLLSYIQSIPVVNEEHRGDFSYIGNLMTKEFIGQQLILIIKSLDTSEEGGRKKLLAVLQEILILPTIPISLVSFLVERLLHIIIDDNKRTQIVTEIISEIRAPIVTVGVNNDPADVRKKELKMAEIKVKLIEAKEALENCITLQDFNRASELKEEIKALEDARINLLKETEQLEIKEVHIEKNDAETLQKCLILCYELLKQMSISTGLSATMNGIIESLILPGIISIHPVVRNLAVLCLGCCGLQNQDFARKHFVLLLQVLQIDDVTIKISALKAIFDQLMTFGIEPFKTKKIKTLHCEGTEINSDDEQESKEVEETATAKNVLKLLSDFLDSEVSELRTGAAEGLAKLMFSGLLVSSRILSRLILLWYNPVTEEDVQLRHCLGVFFPVFAYASRTNQECFEEAFLPTLQTLANAPASSPLAEIDITNVAELLVDLTRPSGLNPQAKTSQDYQALTVHDNLAMKICNEILTSPCSPEIRVYTKALSSLELSSHLAKDLLVLLNEILEQVKDRTCLRALEKIKIQLEKGNKEFGDQAEAAQDATLTTTTFQNEDEKNKEVYMTPLRGVKATQASKSTQLKTNRGQRKVTVSARTNRRCQTAEADSESDHEVPEPESEMKMRLPRRAKTAALEKSKLNLAQFLNEDLS

SEQ ID NO: 31155 - protein, 16 aa, Artificial Sequence
  Synthetic polypeptide
GLEFETSLANMHGKKY

SEQ ID NO: 31156 - protein, 69 aa, Artificial Sequence
  Synthetic polypeptide
NKTQTPKCGSAYLLQCHLIPLFFLTTMVFSFLKSIKLFPTSGSAHCFPLPGKLFSIHLLSALGPKWISN

SEQ ID NO: 31157 - protein, 37 aa, Artificial Sequence
  Synthetic polypeptide
VHVLCTDMDEAGNHHSKQTITRTENQTPHVLTHRPPK

SEQ ID NO: 31158 - protein, 16 aa, Artificial Sequence
  Synthetic polypeptide
VCTWTPFNPVTVRSII

SEQ ID NO: 31159 - protein, 20 aa, Artificial Sequence
  Synthetic polypeptide
VCTWTPFNPVTVRSIICRGR

SEQ ID NO: 31160 - protein, 85 aa, Artificial Sequence
  Synthetic polypeptide
VCTWTPFNPVTVRSIICYRLSDQFHDILIRKFDRQGRGQIAFDDFIQGCIVLQRLTDIFRRYDTDQDGWIQVSYEQYLSMVFSIV

SEQ ID NO: 31161 - protein, 136 aa, Artificial Sequence
  Synthetic polypeptide
VCTWTPFNPVTVRSIISMFDRENKAGVNFSEFTGVWKYITDWQNVFRTYDRDNSGMIDKNELKQALSGYRLSDQFHDILIRKFDRQGRGQIAFDDFIQGCIVLQRLTDIFRRYDTDQDGWIQVSYEQYLSMVFSIV

SEQ ID NO: 31162 - protein, 422 aa, Artificial Sequence
  Synthetic polypeptide
RPSFQRASCPISRMKSMLRDAKKNLDRQAFLEQTRPLRAPPSSQDKIPQQNSESAMAKPQVVVAPVLMSKLSVNAPEFYPSGYSSSYTESYEDGCEDYPTLSEYVQDFLNHLTEQPGSFETEIEQFAETLNGCVTTDDALQELVELIYQQATSIPNFSYMGARLCNYLSHHLTISPQSGNFRQLLLQRCRTEYEVKDQAAKGDEVTRKRFHAFVLFLGELYLNLEIKGTNGQVTRADILQVGLRELLNALFSNPMDDNLICAVKLLKLTGSVLEDAWKEKGKMDMEEIIQRIENVVLDANCSRDVKQMLLKLVELRSSNWGRVHATSTYREATPENDPNYFMNEPTFYTSDGVPFTAADPDYQEKYQELLEREDFFPDYEENGTDLSGAGDPYLDDIDDEMDPEIEEAYEKFCLESERKRKQ

SEQ ID NO: 31163 - protein, 15 aa, Artificial Sequence
  Synthetic polypeptide
MILSSIRKEDIHTTK

SEQ ID NO: 31164 - protein, 92 aa, Artificial Sequence
  Synthetic polypeptide
PGMMAHACNPSTLGGRGGWIMRGRSIGTGTHRSTRPRHRLTERACGTCAATTTRARPGLTPSRACTAATWGRTGASSAGMTSTPTTARITSP

SEQ ID NO: 31165 - protein, 87 aa, Artificial Sequence
  Synthetic polypeptide
NGKFPSLLTHNENMVAKVDEVKSTIKFQMKKVLCLAVAVGHVKMTDDELVYNIHLAVNFLVSLLKKNWQNVRALYIKSTMGKPQRLY

SEQ ID NO: 31166 - protein, 14 aa, Artificial Sequence
  Synthetic polypeptide
SCIFTISKIDDRGC

SEQ ID NO: 31167 - protein, 25 aa, Artificial Sequence
  Synthetic polypeptide
SQHFGRPRQVDYLRGQRWLRERRRP

SEQ ID NO: 31168 - protein, 189 aa, Artificial Sequence
  Synthetic polypeptide
HSEIPSLSKIQKIIQVWWHVPVVPAAQEAEVRIAAKFIIHAPPGEFNEVFNDVRLLLNNDNLLREGAAHAFAQYNLDQFTPVKIEGYEDQVLITEHGDLGNGKFLDPKNRICFKFDHLRKEATDPRPCEVENAVESWRTSVETALRAYVKEHYPNGVCTEWSLEVRMEVYNHSFNHSSGWHLENSGSLL

SEQ ID NO: 31169 - protein, 163 aa, Artificial Sequence
  Synthetic polypeptide
HSEIPSLSKIQKIIQVWWHVPVVPAAQEAEVRIAAKFIIHAPPGEFNEVFNDVRLLLNNDNLLREGAAHAFAQYNLDQFTPVKIEGYEDQVLITEHGDLGNGKFLDPKNRICFKFDHLRKEATDPRPCEVENAVESWRTSVETALRAYVKEHYPNGVCTVSHQ

SEQ ID NO: 31170 - protein, 191 aa, Artificial Sequence
  Synthetic polypeptide
HSEIPSLSKIQKIIQVWWHVPVVPAAQEAEVRIAAKFIIHAPPGEFNEVFNDVRLLLNNDNLLREGAAHAFAQYNLDQFTPVKIEGYEDQVLITEHGDLGNGKFLDPKNRICFKFDHLRKEATDPRPCEVENAVESWRTSVETALRAYVKEHYPNGVCTVYGKKIDGQQTIIACIESHQFQAKNFCCCFYF

SEQ ID NO: 31171 - protein, 303 aa, Artificial Sequence
  Synthetic polypeptide
HSEIPSLSKIQKIIQVWWHVPVVPAAQEAEVRIAAKFIIHAPPGEFNEVFNDVRLLLNNDNLLREGAAHAFAQYNLDQFTPVKIEGYEDQVLITEHGDLGNGKFLDPKNRICFKFDHLRKEATDPRPCEVENAVESWRTSVETALRAYVKEHYPNGVCTVYGKKIDGQQTIIACIESHQFQAKNFWNGRWRSEWKFTITPSTTQVVGILKIQVHYYEDGNVQLVSHKDIQDSLTVSNEVQTAKEFIKIVEAAENEYQTAISENYQTMSDTTFKALRRQLPVTRTKIDWNKILSYKIGKEMQNA

SEQ ID NO: 31172 - protein, 223 aa, Artificial Sequence
  Synthetic polypeptide
AEIAPLHSSLGDRAAKLFDEEGRKKFFTQDMNNILLDIELQLQELGPVIRSGVYSHLEAFVPCNKETLVKRLKKLHLNVQDDRLREPLQKLKLAVSNVMPEQLFKYQEDCQARSQAKCAKLQTDEEREKNGSEEDDDEKPGKRVIGPRKKFHWDDTIRTLLCNLVEIKLGCYELEPNKSQSAEDYLKSFMETEVKPLWPKGWMQARMLFKESRSVHNHLTSAP

SEQ ID NO: 31173 - protein, 895 aa, Artificial Sequence
  Synthetic polypeptide
AEIAPLHSSLGDRAAKLFDEEGRKKFFTQDMNNILLDIELQLQELGPVIRSGVYSHLEAFVPCNKETLVKRLKKLHLNVQDDRLREPLQKLKLAVSNVMPEQLFKYQEDCQARSQAKCAKLQTDEEREKNGSEEDDDEKPGKRVIGPRKKFHWDDTIRTLLCNLVEIKLGCYELEPNKSQSAEDYLKSFMETEVKPLWPKGWMQARMLFKESRSVHNHLTSAPAKKKVIPAPKPKVKEVMVKTLPLHSFPTMLKECSPKKDQKTPTSLVASVSGPPTSSSTAAIAAASSSSAPAQETICLDDSLDEDLSFHSPSLDLVSEALAVINNGNKGPPVGSRISMPTTKPRPGLREEKLASIMSKLPLATPKKLDSTQTTHSSSLIAGHTGPVPKKPQDLAHTGISSGLIAGSSIQNPKVSLEPLPARLLQQGLQRSSQIHTSSSSQTHVSSSSQAQIAASSHALGTSEAQDASSLTQVTKVHQHSAVQQNYVSPLQATISKSQTNPVVKLSNNPQLSCSSSLIKTSDKPLMYRLPLSTPSPGNGSQGSHPLVSRTVPSTTTSSNYLAKAMVSQISTQGFKSPFSMAASPKLAASPKPATSPKPLPSPKPSASPKPSLSAKPSVSTKLISKSNPTPKPTVSPSSSSPNALVAQGSHSSTNSPVHKQPSGMNISRQSPTLNLLPSSRTSGLPPTKNLQAPSKLTNSSSTGTVGKNSLSGIAMNVPASRGSNLNSSGANRTSLSGGTGSGTQGATKPLSTPHRPSTASGSSVVTASVQSTAGASLLANASPLTLMTSPLSVTNQNVTPFGMLGGLVPVTMPFQFPLEIFGFGTDTAGVTTTSGSTSAAFHHSLTQNLLKGLQPGGAQHAATLSHSPLPAHLQQAFHDGGQSKGDTKLPRKSQ

SEQ ID NO: 31174 - protein, 17 aa, Artificial Sequence
  Synthetic polypeptide
VVSKVEFVHFLAFIKNH

SEQ ID NO: 31175 - protein, 35 aa, Artificial Sequence
  Synthetic polypeptide
MGPSSCRKTSSGLPLILHYAMTETPLSMCLWEKDS

SEQ ID NO: 31176 - protein, 37 aa, Artificial Sequence
  Synthetic polypeptide
WSTNVNVLKATKHLKMMKPGLASIQSRIAILSRKPLP

SEQ ID NO: 31177 - protein, 49 aa, Artificial Sequence
  Synthetic polypeptide
KKFWRWMVLMVNKCECTQGHQTLKNGKMMKPGLASIQSRIAILSRKPLP

SEQ ID NO: 31178 - protein, 71 aa, Artificial Sequence
  Synthetic polypeptide
MGVVAHACNSSTLGGQDPLDLLHLPGVRGYPSAAIYDQQDWGGRDHHHPLPVLPGPLSCFVSCQLDLALLL

SEQ ID NO: 31179 - protein, 48 aa, Artificial Sequence
  Synthetic polypeptide
GQEFKTSLGNIVRLHLYKKQMTQVTMPGEPVDVACGVDHMVTLAKSFI

SEQ ID NO: 31180 - protein, 54 aa, Artificial Sequence
  Synthetic polypeptide
GIPSQVELAWHWKRRKFKQLTSGEKILQAMKLSTTMQRMISILRKMTVSQAARG

SEQ ID NO: 31181 - protein, 16 aa, Artificial Sequence
  Synthetic polypeptide
LPRTGIGAPRTRNTSG

SEQ ID NO: 31182 - protein, 20 aa, Artificial Sequence
  Synthetic polypeptide
MQVSLHPKCKADKWAYQGRT

SEQ ID NO: 31183 - protein, 63 aa, Artificial Sequence
  Synthetic polypeptide
HCGRPRQVDCLGPGVPDQPGQHDITRSGAKAACGSTWGTCACRQGCCRTPWCITTCRWSCCVL

SEQ ID NO: 31184 - protein, 17 aa, Artificial Sequence
  Synthetic polypeptide
NLGSVWWLEVAELTNPS

SEQ ID NO: 31185 - protein, 201 aa, Artificial Sequence
  Synthetic polypeptide
SQHFGRWRRADHLRSGVQDQPGQHGETPSLLKIQKLARHGWAEAFAGIRSSHIKYICPHAFDIIGLSPDSQEDESGIKQAAENIKALIDQEVKNGIPSNRIILGGFSQGGALSLYTALTTQQKLAGVTALSCWLPLRASFPQGPIGGANRDISILQCHGDCDPLVPLMFGSLTVEKLKTLVNPANVTFKTYEGMMHSSCQQ

SEQ ID NO: 31186 - protein, 218 aa, Artificial Sequence
  Synthetic polypeptide
SQHFGRWRRADHLRSGVQDQPGQHGETPSLLKIQKLARHGWAEAFAGIRSSHIKYICPHAFDIIGLSPDSQEDESGIKQAAENIKALIDQEVKNGIPSNRIILGGFSQGGALSLYTALTTQQKLAGVTALSCWLPLRASFPQGPIGGANRDISILQCHGDCDPLVPLMFGSLTVEKLKTLVNPANVTFKTYEGMMHSSCQQEMMDVKQFIDKLLPPID

SEQ ID NO: 31187 - protein, 234 aa, Artificial Sequence
  Synthetic polypeptide
SQHFGRWRRADHLRSGVQDQPGQHGETPSLLKIQKLARHGWAEAFAGIRSSHIKYICPHAPVRPVTLNMNVAMPSWFDIIGLSPDSQEDESGIKQAAENIKALIDQEVKNGIPSNRIILGGFSQGGALSLYTALTTQQKLAGVTALSCWLPLRASFPQGPIGGANRDISILQCHGDCDPLVPLMFGSLTVEKLKTLVNPANVTFKTYEGMMHSSCQQEMMDVKQFIDKLLPPID

SEQ ID NO: 31188 - protein, 146 aa, Artificial Sequence; identical to SEQ ID NO: 30954
  Synthetic polypeptide

SEQ ID NO: 31189 - protein, 166 aa, Artificial Sequence
  Synthetic polypeptide
MNSLSIRGAQEEDPPDPQLMRLDNMLLAEGVSGPEKGGGSAAAAAAAAASGGSSDNSIEHSDYRAKLTQIRQIYHTELEKYEQACNEFTTHVMNLLREQSRTRPISPKEIERMVGIIHRKFSSIQMQLKQSTCEAVMILRSRFLDARRKRRNFSKQATEILNEYFY

SEQ ID NO: 31190 - protein, 366 aa, Artificial Sequence
  Synthetic polypeptide
MNSLSIRGAQEEDPPDPQLMRLDNMLLAEGVSGPEKGGGSAAAAAAAAASGGSSDNSIEHSDYRAKLTQIRQIYHTELEKYEQACNEFTTHVMNLLREQSRTRPISPKEIERMVGIIHRKFSSIQMQLKQSTCEAVMILRSRFLDARRKRRNFSKQATEILNEYFYSHLSNPYPSEEAKEELAKKCSITVSQSLVKDPKERGSKGSDIQPTSVVSNWFGNKRIRYKKNIGKFQEEANLYAAKTAVTAAHAVAAAVQNNQTNSPTTPNSGSSGSFNLPNSGDMFMNMQSLNGDSYQGSQVGANVQSQVDTLRHVINQTGGYSDGLGGNSLYSPHNLNANGGWQDATTPSSVTSPTEGPGSVHSDTSN

SEQ ID NO: 31191 - protein, 262 aa, Artificial Sequence
  Synthetic polypeptide
MNSLSIRGAQEEDPPDPQLMRLDNMLLAEGVSGPEKGGGSAAAAAAAAASGGSSDNSIEHSDYRAKLTQIRQIYHTELEKYEQACNEFTTHVMNLLREQSRTRPISPKEIERMVGIIHRKFSSIQMQLKQSTCEAVMILRSRFLDARRKRRNFSKQATEILNEYFYSHLSNPYPSEEAKEELAKKCSITVSQVSNWFGNKRIRYKKNIGKFQEEANLYAAKTAVTAAHAVAAAVQNNQTNSPTTPNSGGYPPSCYQSDGRLQ

SEQ ID NO: 31192 - protein, 345 aa, Artificial Sequence
  Synthetic polypeptide
MNSLSIRGAQEEDPPDPQLMRLDNMLLAEGVSGPEKGGGSAAAAAAAAASGGSSDNSIEHSDYRAKLTQIRQIYHTELEKYEQACNEFTTHVMNLLREQSRTRPISPKEIERMVGIIHRKFSSIQMQLKQSTCEAVMILRSRFLDARRKRRNFSKQATEILNEYFYSHLSNPYPSEEAKEELAKKCSITVSQVSNWFGNKRIRYKKNIGKFQEEANLYAAKTAVTAAHAVAAAVQNNQTNSPTTPNSGSSGSFNLPNSGDMFMNMQSLNGDSYQGSQVGANVQSQVDTLRHVINQTGGYSDGLGGNSLYSPHNLNANGGWQDATTPSSVTSPTEGPGSVHSDTSN

SEQ ID NO: 31193 - protein, 137 aa, Artificial Sequence
  Synthetic polypeptide
MRRPGQASAFLGLSFFTLYLRCTGGEVGATSALAPKIGPLGLIEVVPSASALIIKALKEPPRDRKKQKNIKHSGNITFDEIVNIARQMRHRSLARELSGTIKEILGTAQSVGCNVDGRHPHDIIDDINSGAVECPAS

SEQ ID NO: 31194 - protein, 170 aa, Artificial Sequence
  Synthetic polypeptide
MRRPGQASAFLGLSFFTLYLRCTGGEVGATSALAPKIGPLGLSPKKVGDDIAKATGDWKGLRITVKLTIQNRQAQIEVVPSASALIIKALKEPPRDRKKQKNIKHSGNITFDEIVNIARQMRHRSLARELSGTIKEILGTAQSVGCNVDGRHPHDIIDDINSGAVECPAS

SEQ ID NO: 31195 - protein, 1106 aa, Artificial Sequence
  Synthetic polypeptide
GLILLEQDTAVQNMHKKVEKLETEHMDCSDLLRRQTSELEFSTQREERLRKEFEATTLRVRKLEENIEAERAAHLESKFNSEIIQLRIRDLEGALQVEKASQAEAVADLEIIKNEFKEVESAYEREKHNAQESFAKLNLLEKEYFSKNKKLNEDIEEQKKVIIDLSKRLQYNEKSCSELQEELVMAKKHQAFLVETCENNVKELESILDSFTVSGQWTSGIHKDKDKPPSFSVVLERLRRTLTDYQNKLEDASNEEKACNELDSTKQKIDSHTKNIKELQDKLADVNKELSHLHTKCADREALISTLKVELQNVLHCWEKEKAQAAQSESELQKLSQAFHKDAEEKLTFLHTLYQHLVAGCVLIKQPEGMLDKFSWSELCAVLQENVDALIADLNRANEKIRHLEYICKNKSDTMRELQQTQEDTFTKVAEQIKAQESCWHRQKKELELQYSELFLEVQKRAQKFQEIAEKNMEKLNHIEKSHEQLVLENSHFKKLLSQTQREQMSLLAACALMAGALYPLYSRSCALSTQRDFLQEQVNTFELFKLEIRTLAQALSTVEEKKQEEAKMKKKTFKGLIRIFRKGVIAVLAANRLKILGQSCASLFTWMESFKEGIGMLVCTGEPQDKHKFPKHQKEQLRCLQALSWLTSSDLLAAIISSMAELQDVIGKADPNSRICGHLLIGAAKNSFAKLMDKISLVMECIPLHSSRSITYVEKDSLVQRLAHGLHKVNTLALKYGLRGHVPITKSTASLQKQILGFTQRLHAAEVERRSLRLEVTEFKRSVNEMKKELDKAQGLQMQLNEFKQSKLITHEKFESACEELNNALLREEQAQMLLNEQAQQLQELNYKLELHSSEEADKNQTLGEAVKSLSEAKMELRRKDQSLRQLNRHLTQLEQDKRRLEENIHDAESALRMAAKDKECVANHMRAVENTLHKVRDQISLSWSAASRNDFTLQLPKLHLETFAMEGLKGGPEVVACQAMIKSFMDVYQLASTRIMTLEKEMTSHRSHIAALKSELHTACLRENASLQSIGSRDHSNLSIPSRAPLPADTTGIGDFLPLKAELDTTYTFLKETFINTVPHALTSSHSSPVTMSANANRPTQIGL

SEQ ID NO: 31196 - protein, 1009 aa, Artificial Sequence
  Synthetic polypeptide
GLILLEQDTAVQNMHKKVEKLETEHMDCSDLLRRQTSELEFSTQREERLRKEFEATTLRVRKLEENIEAERAAHLESKFNSEIIQLRIRDLEGALQVEKASQAEAVADLEIIKNEFKEVESAYEREKHNAQESFAKLNLLEKEYFSKNKKLNEDIEEQKKVIIDLSKRLQYNEKSCSELQEELVMAKKHQAFLVETCENNVKELESILDSFTVSGQWTSGIHKDKDKPPSFSVVLERLRRTLTDYQNKLEDASNEEKACNELDSTKQKIDSHTKNIKELQDKLADVNKELSHLHTKCADREALISTLKVELQNVLHCWEKEKAQAAQSESELQKLSQAFHKDAEEKLTFLHTLYQHLVAGCVLIKQPEGMLDKFSWSELCAVLQENVDALIADLNRANEKIRHLEYICKNKSDTMRELQQTQEDTFTKVAEQIKAQESCWHRQKKELELQYSELFLEVQKRAQKFQEIAEKNMEKLNHIEKSHEQLVLENSHFKKLLSQTQREQMSLLAACALMAGALYPLYSRSCALSTQRDFLQEQVNTFELFKLEIRTLAQALSTVEEKKQEEAKMKKKTFKGLIRIFRKGVIAVLAANRLKILGQSCASLFTWMESFKEGIGMLVCTGEPQDKHKFPKHQKEQLRCLQALSWLTSSDLLAAIISSMAELQDVIGKADPNSRICGHLLIGAAKNSFAKLMDKISLVMECIPLHSSRSITYVEKDSLVQRLAHGLHKVNTLALKYGLRGHVPITKSTASLQKQILGFTQRLHAAEVERRSLRLEVTEFKRSVNEMKKELDKAQGLQMQLNEFKQSKLITHEKFESACEELNNALLREEQAQMLLNEQAQQLQELNYKLELHSSEEADKNQTLGEAVKSLSEAKMELRRKDQSLRQLNRHLTQLEQDKRRLEENIHDAESALRMAAKDKECVANHMRAVENTLHKVRDQISLSWSAASRNDFTLQLPKLHLETFAMEGLKGGPEVVACQVRVQWCDHSSLQSQMPGLKQSSCLSLLST

SEQ ID NO: 31197 - protein, 97 aa, Artificial Sequence
  Synthetic polypeptide
GLILLEQDTAVQNMHKKVEKLETEHMDCSDLLRRQTSELEFSTQREERLRKEFEATTLRVRKLEENIEAERAAHLESKFNSEIIQVKCKQIFWPAFS

SEQ ID NO: 31198 - protein, 38 aa, Artificial Sequence
  Synthetic polypeptide
ARSQDGRIGTAPIYSSQRELRRRRVISAFPSEVSRRLW

SEQ ID NO: 31199 - protein, 96 aa, Artificial Sequence
  Synthetic polypeptide
IWETEVTVSRDRAIALQPGQQRETREERTFRNWMNSLGVNPHVNHLYADLQDALVILQLYERIKVPVDWSKVNKPPYPKLGANMKKLENCNYAVEL

SEQ ID NO: 31200 - protein, 257 aa, Artificial Sequence
  Synthetic polypeptide
IWETEVTVSRDRAIALQPGQQRETREERTFRNWMNSLGVNPHVNHLYADLQDALVILQLYERIKVPVDWSKVNKPPYPKLGANMKKLENCNYAVELGKHPAKFSLVGIGGQDLNDGNQTLTLALVWQLMRRYTLNVLEDLGDGQKANDDIIVNWVNRTLSEAGKSTSIQSFKDKTISSSLAVVDLIDAIQPGCINYDLVKSGNLTEDDKHNNAKYAVSMARRIGARVYALPEDLVEVKPKMVMTVFACLMGRGMKRV

SEQ ID NO: 31201 - protein, 105 aa, Artificial Sequence
  Synthetic polypeptide
QNLQQAQCGLDLRHITVVELVGVFPTLIGRIGAKIMPPALALQLRLLLRIPLYSFSMVLVDKHGMDKERYVSLVMPVALFNLIDTFPLRKEEMVLQAEMSQTCNT

SEQ ID NO: 31202 - protein, 471 aa, Artificial Sequence
  Synthetic polypeptide
MVLESTMVCVDNSEYMRNGDFLPTRLQAQQDAVNIVCHSKTRSNPENNVGLITLANDCEVLTTLTPDTGRILSKLHTVQPKGKITFCTGIRVAHLALKHRQGKNHKMRIIAFVGSPVEDNEKDLVKLAKRLKKEKVNVDIINFGEEEVNTEKLTAFVNTLNGKDGTGSHLVTVPPGPSLADALISSPILAGEGGAMLGLGASDFEFGVDPSADPELALALRVSMEEQRQRQEEEARRAAAASAAEAGIATTGTEDSDDALLKMTISQQEFGRTGLPDLSSMTEEEQIAYAMQMSLQGAEFGQAESADIDASSAMDTSEPAKEEDDYDVMQDPEFLQSVLENLPGVDPNNEAIRNAMGSLASQATKDGKKDKKEEDKNFTPEASETTNPPGGTNNSRCAALRAVTLTAKVRGLTPEPPRPRTHQKEETPNTSEHQKEQTLDTLTLRTVTLTAKVCGFILEVSETKNPPIPDT

SEQ ID NO: 31203 - protein, 474 aa, Artificial Sequence
  Synthetic polypeptide
MVLESTMVCVDNSEYMRNGDFLPTRLQAQQDAVNIVCHSKTRSNPENNVGLITLANDCEVLTTLTPDTGRILSKLHTVQPKGKITFCTGIRVAHLALKHRQGKNHKMRIIAFVGSPVEDNEKDLVKLAKRLKKEKVNVDIINFGEEEVNTEKLTAFVNTLNGKDGTGSHLVTVPPGPSLADALISSPILAGEGGAMLGLGASDFEFGVDPSADPELALALRVSMEEQRQRQEEEARRAAAASAAEAGIATTGTEGERDSDDALLKMTISQQEFGRTGLPDLSSMTEEEQIAYAMQMSLQGAEFGQAESADIDASSAMDTSEPAKEEDDYDVMQDPEFLQSVLENLPGVDPNNEAIRNAMGSLASQATKDGKKDKKEEDKNFTPEASETTNPPGGTNNSRCAALRAVTLTAKVRGLTPEPPRPRTHQKEETPNTSEHQKEQTLDTLTLRTVTLTAKVCGFILEVSETKNPPIPDT

SEQ ID NO: 31204 - protein, 287 aa, Artificial Sequence
  Synthetic polypeptide
  misc_feature (1)..(1): Xaa can be any naturally occurring amino acid
XGSPVEDNEKDLVKLAKRLKKEKVNVDIINFGEEALRVSMEEQRQRQEEEARRAAAASAAEAGIATTGTEDSDDALLKMTISQQEFGRTGLPDLSSMTEEEQIAYAMQMSLQGAEFGQAESADIDASSAMDTSEPAKEEDDYDVMQDPEFLQSVLENLPGVDPNNEAIRNAMGSLASQATKDGKKDKKEEDKNFTPEASETTNPPGGTNNSRCAALRAVTLTAKVRGLTPEPPRPRTHQKEETPNTSEHQKEQTLDTLTLRTVTLTAKVCGFILEVSETKNPPIPDT

SEQ ID NO: 31205 - protein, 178 aa, Artificial Sequence
  Synthetic polypeptide
  misc_feature (1)..(1): Xaa can be any naturally occurring amino acid
XIDASSAMDTSEPAKSSINRVLSRPLYLEEDDYDVMQDPEFLQSVLENLPGVDPNNEAIRNAMGSLASQATKDGKKDKKEEDKNFTPEASETTNPPGGTNNSRCAALRAVTLTAKVRGLTPEPPRPRTHQKEETPNTSEHQKEQTLDTLTLRTVTLTAKVCGFILEVSETKNPPIPDT

SEQ ID NO: 31206 - protein, 47 aa, Artificial Sequence; identical to SEQ ID NO: 499
  Synthetic polypeptide

SEQ ID NO: 31207 - protein, 100 aa, Artificial Sequence
  Synthetic polypeptide
MAGKAHRLSAEERDQLLPNLRAVGWNELEGRDAIFKQFHFKDFNRAFGFMTRVALQAEKLDHHPEWFNVSRLQASGVQQYHLLSWFSSLPTTDLGTCQPP

SEQ ID NO: 31208 - protein, 261 aa, Artificial Sequence
  Synthetic polypeptide
MCFFFSLQEEFLDKHTLMRVLSSGGKLGSRGEGAQLCCWMLLFSWRVSGGQQTRRLCRRAFCWSPVPSPSCSPSSCLTARSSLCMTFTQSRTTSSLAPVFALFVPFYCSIPRVQVAQILGPLSITNKTLIYILGLQLFTSGSYIWIVAISGLMSGLCYDSKMFQVHQVLCIPSWMAKFFSWTLEPIFSSSEPTSEARIGMGATLDIQRQQRMELLDRQLMFSQFAQGRRQRQQQIHNYHCVTAASSIQHSDLLYRFVAWSP

SEQ ID NO: 31209 - protein, 296 aa, Artificial Sequence
  Synthetic polypeptide
MFTSTGSSGLYKAPLSKSLLLVPSALSLLLALLLPHCQKLFVYDLHAVKNDFQIWRLICGRIICLDLKDTFCSSLLIYNFRIFERRYGSRKFASFLLGSWVLSALFDFLLIEAMQYFFGITAASNLPSGFLAPVFALFVPFYCSIPRVQVAQILGPLSITNKTLIYILGLQLFTSGSYIWIVAISGLMSGLCYDSKMFQVHQVLCIPSWMAKFFSWTLEPIFSSSEPTSEARIGMGATLDIQRQQRMELLDRQLMFSQFAQGRRQRQQQIHNYHCVTAASSIQHSDLLYRFVAWSP

SEQ ID NO: 31210 - protein, 162 aa, Artificial Sequence
  Synthetic polypeptide
MFTSTGSSGLYKAPLSKSLLLVPSALSLLLALLLPHCQKLFVYDLHAVKNDFQMSGLCYDSKMFQVHQVLCIPSWMAKFFSWTLEPIFSSSEPTSEARIGMGATLDIQRQQRMELLDRQLMFSQFAQGRRQRQQQIHNYHCVTAASSIQHSDLLYRFVAWSP

SEQ ID NO: 31211 - protein, 86 aa, Artificial Sequence
  Synthetic polypeptide
MSVLGEYERHCDSINSDFGSESGGCGDSSPGPSASQGPRAGGGAAEQEELHYIPIRVLGRGAFGEATLYRRTEIILRIKRRLCSVN

SEQ ID NO: 31212 - protein, 186 aa, Artificial Sequence
  Synthetic polypeptide
MNRTKGDEEEYWNSSKFKAFTFDDEDDELSQLKESKRAVNSLRDFVDDDDDDDLERVSWSGEPVGSISWSIRETAGNSGSTHEGREQLKSRNSFSSYAQLPKPTSTYSLSSFFRALSDTPAKSYAPELGRPKGEYRDYSNDWSPSDTVRRLRKGKSQLLERLRWKDCLSPEGRGCNEPRLCHSIPA

SEQ ID NO: 31213 - protein, 199 aa, Artificial Sequence
  Synthetic polypeptide
MNRTKGDEEEYWNSSKFKAFTFDDEDDELSQLKESKRAVNSLRDFVDDDDDDDLERVSWSGEPVGSISWSIRETAGNSGSTHEGREQLKSRNSFSSYAQLPKPTSTYSLSSFFRGRTRPGSFQSLSDALSDTPAKSYAPELGRPKGEYRDYSNDWSPSDTVRRLRKGKSQLLERLRWKDCLSPEGRGCNEPRLCHSIPA

SEQ ID NO: 31214 - protein, 150 aa, Artificial Sequence
  Synthetic polypeptide
MNRTKGDEEEYWNSSKFKAFTFDDEDDELSQLKESKRAVNSLRDFVDDDDDDDLERVSWSGEPVGSRTRPGSFQSLSDALSDTPAKSYAPELGRPKGEYRDYSNDWSPSDTVRRLRKGKSQLLERLRWKDCLSPEGRGCNEPRLCHSIPA

SEQ ID NO: 31215 - protein, 225 aa, Artificial Sequence
  Synthetic polypeptide
MTTGLILFFQSGRPLGAGVRLGLGLRMNRTKGDEEEYWNSSKFKAFTFDDEDDELSQLKESKRAVNSLRDFVDDDDDDDLERVSWSGEPVGSISWSIRETAGNSGSTHEGREQLKSRNSFSSYAQLPKPTSTYSLSSFFRGRTRPGSFQSLSDALSDTPAKSYAPELGRPKGEYRDYSNDWSPSDTVRRLRKGKSQLLERLRWKDCLSPEGRGCNEPRLCHSIPA

SEQ ID NO: 31216 - protein, 191 aa, Artificial Sequence
  Synthetic polypeptide
MSGPGNKRAAGDGGSGPPEKKLSREEKTTTTLIEPIRLGGISSTEEMDLKVLQFKNKKLAERLEQRQACEDELRERIEKLEKRQAQFSLLYNESLQVKTQLDEARGLLLATKNSHLRHIEHMESDELGLQKKLRTEVIQLEDTLAQVRKEYEMLRIEFEQNLAANEQAALSEAKVGGSLEARNLRPARATK

SEQ ID NO: 31217 - protein, 499 aa, Artificial Sequence
  Synthetic polypeptide
MSGPGNKRAAGDGGSGPPEKKLSREEKTTTTLIEPIRLGGISSTEEMDLKVLQFKNKKLAERLEQRQACEDELRERIEKLEKRQATDDATLLIVNRYWAQLDETVEALLRCHESQGELSSAPEAPGTQEGPTCDGTPLPEPGTSELRDPLLMQLRPPLSEPALAFVVALGASSSEEVELELQGRMEFSKAAVSRVVEASDRLQRRVEELCQRVYSRGDSEPLSEAAQAHTRELGRENRRLQDLATQLQEKHHRISLEYSELQDKVTSAETKVLEMETTVEDLQWDIEKLRKREQKLNKHLAEALEQLNSGYYVSGSSSGFQGGQITLSMQKFEMLNAELEENQELANSRMAELEKLQAELQGAVRTNERLKVALRSLPEEVVRETGEYRMLQAQFSLLYNESLQVKTQLDEARGLLLATKNSHLRHIEHMESDELGLQKKLRTEVIQLEDTLAQVRKEYEMLRIEFEQNLAANEQAALSEAKVGGSLEARNLRPARATK

SEQ ID NO: 31218 - protein, 399 aa, Artificial Sequence
  Synthetic polypeptide
MSGPGNKRAAGDGGSGPPEKKLSREEKTTTTLIEPIRLGGISSTEEMDLKVLQFKNKKLAERLEQRQACEDELRERIEKLEKRQATDDATLLIVNRYWAQLDETVEALLRCHESQGELSSAPEAPGTQEGPTCDGTPLPEPGTSELRDPLLMQLRPPLSEPALAFVVALGASSSEEVELELQGRMEFSKAAVSRVVEASDRLQRRVEELCQRVYSRGDSEPLSEAAQAHTRELGRENRRLQDLATQLQEKHHRISLEYSELQDKVTSAETKVLEMETTVEDLQWDIEKLRKREQKLNKHLAEALEQLNSGYYVSGSSSGFQGGQITLSMQKSDELGLQKKLRTEVIQLEDTLAQVRKEYEMLRIEFEQNLAANEQAALSEAKVGGSLEARNLRPARATK

SEQ ID NO: 31219 - protein, 459 aa, Artificial Sequence
  Synthetic polypeptide
MSGPGNKRAAGDGGSGPPEKKLSREEKTTTTLIEPIRLGGISSTEEMDLKVLQFKNKKLAERLEQRQACEDELRERIEKLEKRQATDDATLLIVNRYWAQLDETVEALLRCHESQGELSSAPEAPGTQEGPTCDGTPLPEPGTSELRDPLLMQLRPPLSEPALAFVVALGASSSEEVELELQGRMEFSKAAVSRVVEASDRLQRRVEELCQRVYSRGDSEPLSEAAQAHTRELGRENRRLQDLATQLQEKHHRISLEYSELQDKVTSAETKVLEMETTVEDLQWDIEKLRKREQKLNKHLAEALEQLNSGYYVSGSSSGFQGGQITLSMQKVALRSLPEEVVRETGEYRMLQAQFSLLYNESLQVKTQLDEARGLLLATKNSHLRHIEHMESDELGLQKKLRTEVIQLEDTLAQVRKEYEMLRIEFEQNLAANEQAALSEAKVGGSLEARNLRPARATK

SEQ ID NO: 31220 - protein, 58 aa, Artificial Sequence; identical to SEQ ID NO: 2197
  Synthetic polypeptide

SEQ ID NO: 31221 - protein, 539 aa, Artificial Sequence
  Synthetic polypeptide
MPAYTHASPIHNTHKPYECKECGKYFSCGSNLIQHQSIHTGEKPYKCKECGKAFQLHIQLTRHQKFHTGEKTFECKECGKAFNLPTQLNRHKNIHTVKKLFECKECGKSFNRSSNLTQHQSIHAGVKPYQCKECGKAFNRGSNLIQHQKIHSNEKPFVCRECEMAFRYHYQLIEHCRIHTGEKPFECKECRKAFTLLTKLVRHQKIHMGEKPFECRECGKAFSLLNQLNRHKNIHTGEKPFECKECGKSFNRSSNLIQHQSIHADVKPYECKECGKGFNRGANLIQHQKIHSNEKPFVCRECEMAFRYHYQLIQHCQIHTGGKPFECKECGKAFSLLTQLARHKNIHTGEKPFECKDCGKAFNRGSNLVQHQSIHTGEKPYECKECGKAFRLHLQLSQHEKTHTGEKPFECKECGKFFRRGSNLNQHRSIHTGKKPFECKECGKAFRLHMHLIRHQKFHTGEKPFECKECGKAFSLHTQLNHHKNIHTAQFDRSFSVGGCCQDDGAAAVNQGLSYINRRGMPPGFLIPTSSWLKWLNSW

SEQ ID NO: 31222 - protein, 687 aa, Artificial Sequence
  Synthetic polypeptide
MVHGSVTFRDVAIDFSQEEWECLQPDQRTLYRDVMLENYSHLISLGSSISKPDVITLLEQEKEPWIVVSKETSRWYPDLESKYGPEKISPENDIFEINLPKHVIKQISKTLGLEAFYFRNDSEYRSRFEGRQGHQEGYINQKIISYEEMPAYTHASPIHNTHKPYECKECGKYFSCGSNLIQHQSIHTGEKPYKCKECGKAFQLHIQLTRHQKFHTGEKTFECKECGKAFNLPTQLNRHKNIHTVKKLFECKECGKSFNRSSNLTQHQSIHAGVKPYQCKECGKAFNRGSNLIQHQKIHSNEKPFVCRECEMAFRYHYQLIEHCRIHTGEKPFECKECRKAFTLLTKLVRHQKIHMGEKPFECRECGKAFSLLNQLNRHKNIHTGEKPFECKECGKSFNRSSNLIQHQSIHADVKPYECKECGKGFNRGANLIQHQKIHSNEKPFVCRECEMAFRYHYQLIQHCQIHTGGKPFECKECGKAFSLLTQLARHKNIHTGEKPFECKDCGKAFNRGSNLVQHQSIHTGEKPYECKECGKAFRLHLQLSQHEKTHTGEKPFECKECGKFFRRGSNLNQHRSIHTGKKPFECKECGKAFRLHMHLIRHQKFHTGEKPFECKECGKAFSLHTQLNHHKNIHTAQFDRSFSVGGCCQDDGAAAVNQGLSYINRRGMPPGFLIPTSSWLKWLNSW

SEQ ID NO: 31223 - protein, 187 aa, Artificial Sequence
  Synthetic polypeptide
MGRVVAELVSSLLGLWLLLCSCGCPEGAELRAPPDKIAIIGAGIGGTSAAYYLRQKFGKDVKIDLFEREEVGGRLATMMVQGQEYEAGGSVIHPLNLHMKRFVKDLGLSAVQASGGLLGIYNGETLVFEESNWFIINVIKLVWRYGFQSLRMHMWVEDVLDKFMSFRYWRPGSHHYTPAWVTEQDSI

SEQ ID NO: 31224 - protein, 110 aa, Artificial Sequence
  Synthetic polypeptide
MMVQGQEYEAGGSVIHPLNLHMKRFVKDLGLSAVQASGGLLGIYNGETLVFEESNWFIINVIKLVWRYGFQSLRMHMWVEDVLDKFMSFRYWRPGSHHYTPAWVTEQDSI

SEQ ID NO: 31225 - protein, 109 aa, Artificial Sequence
  Synthetic polypeptide
MVQGQEYEAGGSVIHPLNLHMKRFVKDLGLSAVQASGGLLGIYNGETLVFEESNWFIINVIKLVWRYGFQSLRMHMWVEDVLDKFMSFRYWRPGSHHYTPAWVTEQDSI

SEQ ID NO: 31226 - protein, 1197 aa, Artificial Sequence
  Synthetic polypeptide
MAKPYEFNWQKEVPSFLQEGAVFDRYEEESFVFEPNCLFKVDEFGFFLTWRSEGKEGQVLECSLINSIRSGAIPKDPKILAALEAVGKSENDLEGRIVCVCSGTDLVNISFTYMVAENPEVTKQWVEGLRSIIHNFRANNVSPMTCLKKHWMKLAFMTNTNGKIPVRSITRTFASGKTEKVIFQALKELGLPSGKNDEIEPTAFSYEKFYELTQKICPRTDIEDLFKKINGDKTDYLTVDQLVSFLNEHQRDPRLNEILFPFYDAKRAMQIIEMYEPDEDLKKKGLISSDGFCRYLMSDENAPVFLDRLELYQEMDHPLAHYFISSSHNTYLTGRQFGGKSSVEMYRQVLLAGCRCVELDCWDGKGEDQEPIITHGKAMCTDILFKDVIQAIKETAFVTSEYPVILSFENHCSKYQQYKMSKYCEDLFGDLLLKQALESHPLEPGRALPSPNDLKRKILIKNKRLKPEVEKKQLEALRSMMEAGESASPANILEDDNEEEIESADQEEEAHPEFKFGNELSADDLGHKEAVANSVKKGLVTVEDEQAWMASYKYVGATTNIHPYLSTMINYAQPVKFQGFHVAEERNIHYNMSSFNESVGLGYLKTHAIEFVNYNKRQMSRIYPKGGRVDSSNYMPQIFWNAGCQMVSLNYQTPDLAMQLNQGKFEYNGSCGYLLKPDFMRRPDRTFDPFSETPVDGVIAATCSVQVISGQFLSDKKIGTYVEVDMYGLPTDTIRKEFRTRMVMNNGLNPVYNEESFVFRKVILPDLAVLRIAVYDDNNKLIGQRILPLDGLQAGYRHISLRNEGNKPLSLPTIFCNIVLKTYVPDGFGDIVDALSDPKKFLSITEKRADQMRAMGIETSDIADVPSDTSKNDKKGKANTAKANVTPQSSSELRPTTTAALASGVEAKKGIELIPQVRIEDLKQMKAYLKHLKKQQKELNSLKKKHAKEHSTMQKLHCTQVDKIVAQYDKEKSTHEKILEKAMKKKGGSNCLEMKKETEIKIQTLTSDHKSKVKEIVAQHTKEWSEMINTHSAEEQEIRDLHLSQQCELLKKLLINAHEQQTQQLKLSHDRESKEMRAHQAKISMENSKAISQDKSIKNKAERERRVRELNSSNTKKFLEERKRLAMKQSKEMDQLKKVQLEHLEFLEKQNEQLLKSCHAVSQTQAKQALASREAILKQFAAHHQPLTNGAPLFQQP

SEQ ID NO: 31227 - protein, 253 aa, Artificial Sequence
  Synthetic polypeptide
MKKFNFRKVLDGLTASSPGSGSSSGSNSGGGAGSGSVHPAGTAGVLREEIQETLTSEYFQICKTVRHGFPHQPTALAFDPVQKILAIGTRTGAIRILGRPGVDCYCQHESGAAVLQLQFLINEGALVSASSDDTLHLWNLRQKRPAILHSLKFNRERITYCHLPFQSKWLYVGTERGNTHIVNIESFILSGYVIMWNKAIELSTKTHPGPVVHLSDSPRDEGKVFRLRLAHHQLSWISCLPAHPADLGTCQPS

SEQ ID NO: 31228 - protein, 19 aa, Artificial Sequence
  Synthetic polypeptide
MKRSLQALYCQLLTYVKPV

SEQ ID NO: 31229 - protein, 53 aa, Artificial Sequence
  Synthetic polypeptide
AKIAPFRSSLCKRRGTESSQHCPGIVSEMDRAPPGPLHSNKGRNRLDHQRAEK

SEQ ID NO: 31230 - protein, 56 aa, Artificial Sequence
  Synthetic polypeptide
NLSAHLPTLGLQGQRLNSIKTPNLMCFWIGEQLDILENIYNDEDPEGSVDPEGQGS

SEQ ID NO: 31231 - protein, 56 aa, Artificial Sequence
  Synthetic polypeptide
SSETGTSQPNLERPPSRLSPPEAAFQRMLAMELRSPDHPRAEYPDFSPSPGPVAGL

SEQ ID NO: 31232 - protein, 94 aa, Artificial Sequence
  Synthetic polypeptide
GWARWLTPVIPALWEAERQASLGTTGTSAAKPGARESPTTRSGSMSWGAQLPTPRLAPAASTQSVCGEVVLVKQGSSMLSTMHLITSWFVPRPW

SEQ ID NO: 31233 - protein, 60 aa, Artificial Sequence
  Synthetic polypeptide
GCPTCECHSLGHFCHCSPQACCMWKNELDKFIVFWFQSSKIIQHQFLMPCTCCHPACTLF

SEQ ID NO: 31234 - protein, 42 aa, Artificial Sequence
  Synthetic polypeptide
GCPTCECHSLGHFCHCSPQACCMWKNELDKFIVFWFQSSTLF

SEQ ID NO: 31235 - protein, 57 aa, Artificial Sequence
  Synthetic polypeptide
WWFIRYLPLKNVTSRKGKDVVLRQSLSLMAHGATRWKEVPSVPRHTPSLPSSMKTSR

SEQ ID NO: 31236 - protein, 282 aa, Artificial Sequence
  Synthetic polypeptide
GLHSHTFCTACGTVPKSKALEAVKLAIEAGFHHIDSAHVYNNEEQVGLAIRSKIADGSVKREDIFYTSKLWSNSHRPELVRPALERSLKNLQLDYVDLYLIHFPVSVKAMEKCKDAGLAKSIGVSNFNHRLLEMILNKPGLKYKPVCNQVECHPYFNQRKLLDFCKSKDIVLVAYSALGSHREEPWVDPNSPVLLEDPVLCALAKKHKRTPALIALRYQLQRGVVVLAKSYNEQRIRQNVQVFEFQLTSEEMKAIDGLNRNVRYLTLDIFAGPPNYPFSDEY

SEQ ID NO: 31237 - protein, 124 aa, Artificial Sequence
  Synthetic polypeptide
GLHSHTFCTACGTVPKSKALEAVKLAIEAGFHHIDSAHVYNNEEQVGLAIRSKIADGSVKREDIFYTSKLWSNSHRPELVRPALERSLKNLQLDYVDLYLIHFPVSVKEDIGILTWKKSPKHNS

SEQ ID NO: 31238 - protein, 185 aa, Artificial Sequence
  Synthetic polypeptide
GLHSHTFCTACGTVPKSKALEAVKLAIEAGFHHIDSAHVYNNEEQVGLAIRSKIADGSVKREDIFYTSKLWSNSHRPELVRPALERSLKNLQLDYVDLYLIHFPVSVKPGEEVIPKDENGKILFDTVDLCATWEAMEKCKDAGLAKSIGVSNFNHRLLEMILNKPGLKYKPVCNQVECHPYFNQR

SEQ ID NO: 31239 - protein, 308 aa, Artificial Sequence
  Synthetic polypeptide
GLHSHTFCTACGTVPKSKALEAVKLAIEAGFHHIDSAHVYNNEEQVGLAIRSKIADGSVKREDIFYTSKLWSNSHRPELVRPALERSLKNLQLDYVDLYLIHFPVSVKPGEEVIPKDENGKILFDTVDLCATWEAMEKCKDAGLAKSIGVSNFNHRLLEMILNKPGLKYKPVCNQVECHPYFNQRKLLDFCKSKDIVLVAYSALGSHREEPWVDPNSPVLLEDPVLCALAKKHKRTPALIALRYQLQRGVVVLAKSYNEQRIRQNVQVFEFQLTSEEMKAIDGLNRNVRYLTLDIFAGPPNYPFSDEY

SEQ ID NO: 31240 - protein, 272 aa, Artificial Sequence; identical to SEQ ID NO: 7469
  Synthetic polypeptide

SEQ ID NO: 31241 - protein, 114 aa, Artificial Sequence; identical to SEQ ID NO: 7471
  Synthetic polypeptide

SEQ ID NO: 31242 - protein, 175 aa, Artificial Sequence; identical to SEQ ID NO: 7470
  Synthetic polypeptide

SEQ ID NO: 31243 - protein, 298 aa, Artificial Sequence; identical to SEQ ID NO: 7467
  Synthetic polypeptide

SEQ ID NO: 31244 - protein, 78 aa, Artificial Sequence
  Synthetic polypeptide
EVRSVSARPPRLRSEETLRLATAPSEKSTICRSSGEVPHWPPRSLSRETTAMGPSVSSRPNSPQSWTAGSSGSSLKRL

SEQ ID NO: 31245 - protein, 184 aa, Artificial Sequence
  Synthetic polypeptide
SQHFWGAKAGGSRGQEIETILGNMELALRSQLPTLEQDGGTQNPVSSPGMSQELRTMTTNSSDPFLNSGTYHSRDESTDSGLSMSSYSVPRTPDDFLNSVDEMDTGDTINQSTLPSQQNRFPDYLEAIPGTNVDLGTLEGDGMNIEGEELMPSLQEALSSDILNDMESVLAATKLDKESFLTWL

SEQ ID NO: 31246 - protein, 50 aa, Artificial Sequence
  Synthetic polypeptide
SQGSETSLGSILRHPICTNKLLTARKPHFYLPDFYFGKFRFKRICRTLYR

SEQ ID NO: 31247 - protein, 26 aa, Artificial Sequence
  Synthetic polypeptide
GSTTDLFWTVKTKSLMYCSWETPWCS

SEQ ID NO: 31248 - protein, 62 aa, Artificial Sequence
  Synthetic polypeptide
EDRLRPEVQDQPGQHSKALSLSKKVKKNCQEAVLNGLVATEVLMWFYVGEIIGKRGIIGYDV

SEQ ID NO: 31249 - protein, 50 aa, Artificial Sequence
  Synthetic polypeptide
QNPVCTKNTKISREWWHAPVIPAAWEVEAREFLEPVLPRVLLKEELTTPK

SEQ ID NO: 31250 - protein, 57 aa, Artificial Sequence
  Synthetic polypeptide
PCTRHPSSLSLGFPTWAGRPCWCIGPWPSSPRPSSLSSSWTTPSASRSYASASQGCW

SEQ ID NO: 31251 - protein, 47 aa, Artificial Sequence
  Synthetic polypeptide
NFCSMKQTFKRWEGITAMAPTLQDLVDMASVHMKTKNLPMQEKLFLL

SEQ ID NO: 31252 - protein, 93 aa, Artificial Sequence
  Synthetic polypeptide
GVPNSRAVACLEPGCTAGEHLWLYQKKRCQMCTVFCRASPKDRLKKCRDRPGGSGKRTSSQLKPLPWPPCRLSMTGSIHMLPSPMKNGMTLLL

SEQ ID NO: 31253 - protein, 59 aa, Artificial Sequence
  Synthetic polypeptide
AQEFKATVSHDHATALQPASRILQSSSTSSSFSSCSSTPSSSRLAWSTSYSISSKGPSS

SEQ ID NO: 31254 - protein, 31 aa, Artificial Sequence; identical to SEQ ID NO: 8516
  Synthetic polypeptide

SEQ ID NO: 31255 - protein, 65 aa, Artificial Sequence
  Synthetic polypeptide
NRPIERTDVTRYHLSAMLDLGEPLRQKIGGGCPGGQLLPQRQGHQEDLGQRGYRGGRRPAQQGYQ

SEQ ID NO: 31256 - protein, 67 aa, Artificial Sequence; identical to SEQ ID NO: 9040
  Synthetic polypeptide

SEQ ID NO: 31257 - protein, 129 aa, Artificial Sequence
  Synthetic polypeptide
NGTRTYGITGIRPPTSVRPCHHCEPGRDEQPAARHLHPTADTHLGLLCHQGAGRADGFAVGFQDPGPGAKSGWGAVLGGRLASGRRAEQPRRAGRGRVHGPGEDREQLTPWGAPEAREPAGQHAGEPAV

SEQ ID NO: 31258 - protein, 103 aa, Artificial Sequence
  Synthetic polypeptide
NGTRTYGITGIRPPTSVRPCHHCEPGRDEQPAARHLHPTADTHLGLLCHQGAGRADGFAVGFQGLLAPGGGCTSCLHQLICPGGRKVPPSLCCQTPYPEPQES

SEQ ID NO: 31259 - protein, 95 aa, Artificial Sequence
  Synthetic polypeptide
NGTRTYGITGIRPPTSVRPCHHCEPGRDEQPAARHLHPTADTHLGLLCHQGAGRADGFAVGFQVHGPGEDREQLTPWGAPEAREPAGQHAGEPAV

SEQ ID NO: 31260 - protein, 44 aa, Artificial Sequence
  Synthetic polypeptide
LRDPRAGSCMLMGLMERAAKRTRRLQGATAMVRRQPKCRTSKTT

SEQ ID NO: 31261 - protein, 41 aa, Artificial Sequence
  Synthetic polypeptide
CQASCTARKTFLRKTKDLDQFLKSSQSIPFIQRNHWKEKSH

SEQ ID NO: 31262 - protein, 51 aa, Artificial Sequence
  Synthetic polypeptide
CQASCTARKTFLRKTKDLDQFLKSSQSIPFIQRNHWKEKSHSTVGHEPALS

SEQ ID NO: 31263 - protein, 57 aa, Artificial Sequence
  Synthetic polypeptide
CQASCTARKTFLRKTKDLDQFLKSSQSIPFIQRNHWKEKSHSTVGHEPALSRFTNGE

SEQ ID NO: 31264 - protein, 41 aa, Artificial Sequence; identical to SEQ ID NO: 9863
  Synthetic polypeptide

SEQ ID NO: 31265 - protein, 32 aa, Artificial Sequence
  Synthetic polypeptide
SQLLERLRQENRLNPGGGGYNDFGNYNNQSSN

SEQ ID NO: 31266 - protein, 80 aa, Artificial Sequence
  Synthetic polypeptide
SQLLERLRQENRLNPGGGGYNDFGNYNNQSSNFGPMKGGNFGGRSSGPYGGGGQYFAKPRNQGGYGGSSSSSSYGSGRRF

SEQ ID NO: 31267 - protein, 113 aa, Artificial Sequence
  Synthetic polypeptide
IRISTLTQSLSDVTPGEIILMLQANWLLVPSMLATRFLELKLVIISQAVMTEVVLSKMLSTKPGALDKRLWLRALGSALLAMKTGIKICGSRPAPHLSGAQLTTLTTTALRAT

SEQ ID NO: 31268 - protein, 94 aa, Artificial Sequence
  Synthetic polypeptide
PPYLMWPPSTSIYSTLLLTIYHNYFKHYVSIYLPVYYLSPNTRMEVPSSSTASSTECCGPASQVSCIRSHPPGGTQCHGNDVPVTPIGQAGEQP

SEQ ID NO: 31269 - protein, 72 aa, Artificial Sequence
  Synthetic polypeptide
EMQKEILQAEQNDTKKSGSTRRNGKHTNAQMSVPFNRFWAPKRNTSALVRTGIKSPSVDRKRLCYMNVALVI

SEQ ID NO: 31270 - protein, 39 aa, Artificial Sequence
  Synthetic polypeptide
GAPPPGRDPVWEVRSVSARPPRLRSEETLRLATARLRTL

SEQ ID NO: 31271 - protein, 37 aa, Artificial Sequence
  Synthetic polypeptide
ELGHIAGISDRSVAWPFSFPKLCSLKNRRLELGRVPK

SEQ ID NO: 31272 - protein, 70 aa, Artificial Sequence
  Synthetic polypeptide
KPLPIILPTGTPNLRTIYTKKHLHKNQKSVMLKVADHSGQVKTKCFEMTIPQFQNFYRQFKEIAAVIETV

SEQ ID NO: 31273 - protein, 83 aa, Artificial Sequence
  Synthetic polypeptide
KPLPIILPTGTPNLRTIYTKKHLHKNQKSVMLKVADHSGQVKTKCFEMTIPQFQPQLLATSSLLSASNFYRQFKEIAAVIETV

SEQ ID NO: 31274 - protein, 106 aa, Artificial Sequence
  Synthetic polypeptide
GYQGRSRKRAVLHNKRKNCLNGGVSGMSHRPGVEEESVKQGTGTSWDVGSSRSPARRTSHFLSRTPASLESDAPTVWPRQPDVSHHTGRRSCYRKTSDFASSRWLF

SEQ ID NO: 31275 - protein, 64 aa, Artificial Sequence
  Synthetic polypeptide
SRFLYKSQKLREQIKYPYPLQWEHQLQPLPQESSHHVSRHVQEPVLPEAELCDRRGHGRVLLCE

SEQ ID NO: 31276 - protein, 36 aa, Artificial Sequence; identical to SEQ ID NO: 11013
  Synthetic polypeptide

SEQ ID NO: 31277 - protein, 83 aa, Artificial Sequence
  Synthetic polypeptide
YRAVDMKKLKSGKNLRKKTGRRKHSGYNKKGRKQEERMVAHWLKALWRMFWIPKTKPKRAMVKRMKNVRPKRKEQSQQRNYTQ

SEQ ID NO: 31278 - protein, 33 aa, Artificial Sequence
  Synthetic polypeptide
FTLATLKMRAKVIDATVKIASILVWMRSPLSTF

SEQ ID NO: 31279 - protein, 30 aa, Artificial Sequence
  Synthetic polypeptide
AEILPSHSSLGHRVSECCAFMGLFFMKQSV

SEQ ID NO: 31280 - protein, 44 aa, Artificial Sequence
  Synthetic polypeptide
FSSKSRHQRENGFVKKFEPKSGWMTFLEVTGKICEMLSLLKQYC

SEQ ID NO: 31281 - protein, 774 aa, Artificial Sequence
  Synthetic polypeptide
LLSMTCKALPDLAGLAHLLGFSFHYFVLAYCRNTELLLFDGIECEFPIFFLYMMIDGVFRGNPKQVQEYQDLLTPVLHHTTEGYPVVPKYYYVPADFVEYEKNNPGSQKRFPSNCGRDGKLFLWGQALYIIAKLLADELISPKDIDPVQRYVPLKDQRNVSMRFSNQGPLENDLVVHVALIAESQRLQVFLNTYGIQTQTPQQVEPIQIWPQQELVKAYLQLGINEKLGLSGRPDRPIGCLGTSKIYRILGKTVVCYPIIFDLSDFYMSQDVFLLIDDIKNALQFIKQYWKMHGRPLFLVLIREDNIRGSRFNPILDMLAALKKGIIGGVKVHVDRLQTLISGAVVEQLDFLRISDTEELPEFKSFEELEPPKHSKVKRQSSTPSAPELGQQPDVNISEWKDKPTHEILQKLNDCSCLASQAILLGILLKREGPNFITKEGTVSDHIERVYRRAGSQKLWLAVRYGAAFTQKFSSSIAPHITTFLVHGKQVTLGAFGHEEEVISNPLSPRVIQNIIYYKCNTHDEREAVIQQELVIHIGWIISNNPELFSGMLKIRIGWIIHAMEYELQIRGGDKPALDLYQLSPSEVKQLLLDILQPQQNGRCWLNRRQIDGSLNRTPTGFYDRVWQILERTPNGIIVAGKHLPQQPTLSDMTMYEMNFSLLVEDTLGNIDQPQYRQIVVELLMVVSIVLERNPELEFQDKVDLDRLVKEAFNEFQKDQSRLKEIEKQDDMTSFYNTPPLGKRGTCSYLTKAVMNLLLEGEVKPNNDDPCLIS

SEQ ID NO: 31282 - protein, 774 aa, Artificial Sequence
  Synthetic polypeptide
LLSMTCKALPDLAGLAHLLGFSFHYFVLAYCRNTELLLFDGIECEFPIFFLYMMIDGVFRGNPKQVQEYQDLLTPVLHHTTEGYPVVPKYYYVPADFVEYEKNNPGSQKRFPSNCGRDGKLFLWGQALYIIAKLLADELISPKDIDPVQRYVPLKDQRNVSMRFSNQGPLENDLVVHVALIAESQRLQVFLNTYGIQTQTPQQVEPIQIWPQQELVKAYLQLGINEKLGLSGRPDRPIGCLGTSKIYRILGKTVVCYPIIFDLSDFYMSQDVFLLIDDIKNALQFIKQYWKMHGRPLFLVLIREDNIRGSRFNPILDMLAALKKGIIGGVKVHVDRLQTLISGAVVEQLDFLRISDTEELPEFKSFEELEPPKHSKVKRQSSTPSAPELGQQPDVNISEWKDKPTHEILQKLNDCSCLASQAILLGILLKREGPNFITKEGTVSDHIERVYRRAGSQKLWSVVRRAASLLSKVVDSLAPSITNVLVQGKQVTLGAFGHEEEVISNPLSPRVIQNIIYYKCNTHDEREAVIQQELVIHIGWIISNNPELFSGMLKIRIGWIIHAMEYELQIRGGDKPALDLYQLSPSEVKQLLLDILQPQQNGRCWLNRRQIDGSLNRTPTGFYDRVWQILERTPNGIIVAGKHLPQQPTLSDMTMYEMNFSLLVEDTLGNIDQPQYRQIVVELLMVVSIVLERNPELEFQDKVDLDRLVKEAFNEFQKDQSRLKEIEKQDDMTSFYNTPPLGKRGTCSYLTKAVMNLLLEGEVKPNNDDPCLIS

SEQ ID NO: 31283 - protein, 58 aa, Artificial Sequence
  Synthetic polypeptide
QAWQKSTDRTGSLREDVLQLCHEGGCCSGFEEERMGGGGVGPLCHELQSHHFQKGHHR

SEQ ID NO: 31284 - protein, 51 aa, Artificial Sequence
  Synthetic polypeptide
VSSPWLHIQSLGGHFKIFSIPGTAPQTNEIRISEALGNGYFLKTEQIRNIF

SEQ ID NO: 31285 - protein, 32 aa, Artificial Sequence
  Synthetic polypeptide
EVPFTSHHNSEPSPAIWNFSCMAPRMLPIQAV

SEQ ID NO: 31286 - protein, 138 aa, Artificial Sequence
  Synthetic polypeptide
GRVRWLMPVIPALWDPEAGGSPEVRSSRPAWPPWRNPISTKSIKIASYSTYGNPGSQGYGQASQVIHSPMVVMRIKSRAHIASNHIITRDSSKTWNHQEAKVEEHLPMTSQTMVNKIHMTSSQAMINIKAHMMSSQIM

SEQ ID NO: 31287 - protein, 151 aa, Artificial Sequence
  Synthetic polypeptide
KLPVILPMEIQAAKAMDKHHKAILAMGKRLIPLMDRTTAVTPVMDKVIHSPMVVMRIKSRAHIASNHIITRDSSKTWNHQEAKVEEHLPMTSQTMVNKIHMTSSQAMINIKAHMMSSQIMISSMIPIVKTSSPIIHKGKTTATTHKMTVVM

SEQ ID NO: 31288 - protein, 154 aa, Artificial Sequence
  Synthetic polypeptide
KLPVILPMEIQAAKAMDKHHKAILAMGKRLIPLMDRTTAVTPVMDKVSQVIHSPMVVMRIKSRAHIASNHIITRDSSKTWNHQEAKVEEHLPMTSQTMVNKIHMTSSQAMINIKAHMMSSQIMISSMIPIVKTSSPIIHKGKTTATTHKMTVVM

SEQ ID NO: 31289 - protein, 930 aa, Artificial Sequence
  Synthetic polypeptide
TREAEVARWLTEQRAQCPHCRAPLQLRELVNCRWAEEVTQQLDTLQLCSLTKHEENEKDKCENHHEKLSVFCWTCKKCICHQCALWGGMHGGHTFKPLAEIYEQHVTKVNEEVAKLRRRLMELISLVQEVERNVEAVRNAKDERVREIRNAVEMMIARLDTQLKNKLITLMGQKTSLTQETELLESLLQEVEHQLRSCSKSELISKSSEILMMFQQVHRKPMASFVTTPVPPDFTSELVPSYDSATFVLENFSTLRQRADPVYSPPLQVSGLCWRLKVYPDGNGVVRGYYLSVFLELSAGLPETSKYEYRVEMVHQSCNDPTKNIIREFASDFEVGECWGYNRFFRLDLLANEGYLNPQNDTVILRFQVRSPTFFQKSRDQHWYITQLEAAQTSYIQQINNLKERLTIELSRTQKSRDLSPPDNHLSPQNDDALETRAKKSACSDMLLEGGPTTASVREAKEDEEDEEKIQNEDYHHELSDGDLDLDLVYEDEVNQLDGSSSSASSTATSNTEENDIDEETMSGENDVEYNNMELEEGELMEDAAAAGPAGSSHGYVGSSSRISRRTHLCSAATSSLLDIDPLILIHLLDLKDRSSIENLWGLQPRPPASLLQPTASYSRKDKDQRKQQAMWRVPSDLKMLKRLKTQMAEVRCMKTDVKNTLSEIKSSSAASGDMQTSLFSADQAALAACGTENSGRLQDLGMELLAKSSVANCYIRNSTNKKSNSPKPARSSVAGSLSLRRAVDPGENSRSKGDCQTLSEGSPGSSQSGSRHSSPRALIHGSIGDILPKTEDRQCKALDSDAVVVAVFSGLPAVEKRRKMVTLGANAKGGHLEGLQMTDLENNSETGELQPVLPEGASAAPEEGMSSDSDIECDTENEEQEEHTSVGGFHDSFMVMTQPPDEDTHSSFPDGEQIGPEDLSFNTDENSGR

SEQ ID NO: 31290 - protein, 69 aa, Artificial Sequence
  Synthetic polypeptide
TREAEVARWLTEQRAQCPHCRAPLQLRELVNCRWAEEVTQQLDTLQLCSLTKHEENEKDKYVLNFFVQY

SEQ ID NO: 31291 - protein, 79 aa, Artificial Sequence
  Synthetic polypeptide
TREAEVARWLTEQRAQCPHCRAPLQLRELVNCRWAEEVTQQLDTLQLCSLTKHEENEKDNMADIPLNLWQKFMSNTSLK

SEQ ID NO: 31292 - protein, 24 aa, Artificial Sequence
  Synthetic polypeptide
TREAEVARWLTEQRAQCPHCRKGM

SEQ ID NO: 31293 - protein, 33 aa, Artificial Sequence
  Synthetic polypeptide
TREAEVARWLTEQRAQCPHCRVSLCRPGRSAMA

SEQ ID NO: 31294 - protein, 41 aa, Artificial Sequence
  Synthetic polypeptide
GAPLPGRDPVWELRSVSARPPPCLGDEERLCPAAPSEKHIF

SEQ ID NO: 31295 - protein, 81 aa, Artificial Sequence
  Synthetic polypeptide
NVAGQIQRKSGGSAQGCEAGAPRGPSGTQEMGPLSRTQERSSHGASGLAGDGAHARGLLAPQHPAPRLQGDPRAPGRPRLP

SEQ ID NO: 31296 - protein, 47 aa, Artificial Sequence
  Synthetic polypeptide
AWPEPPFQPHLQSPSSTHPPPPSGLVTEPAAFDIGSTDRRGRVWSCP

SEQ ID NO: 31297 - protein, 49 aa, Artificial Sequence
  Synthetic polypeptide
AWPEPPFQPHLQSPSSTHPPPPSGLVTEPAAFDIGSTDRRGRVWSCPAG

SEQ ID NO: 31298 - protein, 57 aa, Artificial Sequence
  Synthetic polypeptide
KKERLTGALWIPYFQIWGAKLRSCPSPPSPATTPTPRRTRMLWPSPVNLRFTAQPAC

SEQ ID NO: 31299 - protein, 102 aa, Artificial Sequence
  Synthetic polypeptide
CLNNTGLNYAGPFVFSSTSATPETARPMLLLPHHPHQCEDKDEDLYDDPLPLNTYSCLCVSLSPPLVSKGSHRSRWLRTMAVPAGTQVWRQDLQPLGAVLLQ

SEQ ID NO: 31300 - protein, 47 aa, Artificial Sequence
  Synthetic polypeptide
GQDPLHHILRVHQQQGPLLRLLLLQRASDVAAAAARVLVLPHSAHAL

SEQ ID NO: 31301 - protein, 41 aa, Artificial Sequence
  Synthetic polypeptide
QGSCNTAAMAIWRTSALGQRIALTPHSPAALRWTIIEGFKC

SEQ ID NO: 31302 - protein, 172 aa, Artificial Sequence
  Synthetic polypeptide
QMLARMWRKGKPHTLLVEVKISTTTMKNSSEVPQKAENRATVRSSNSTARYIPKIKEIDISKRYLHSHFAALFTIAKICKQPKHPSTDEWIKKMWYIRTVEYYSAIRKNAICHLQQHGWNWRHRRRNNRNHPGEEREKQKTRMKVVREKVLGDVATKLATILNTRVEMAQVQ

SEQ ID NO: 31303 - protein, 193 aa, Artificial Sequence
  Synthetic polypeptide
QMLARMWRKGKPHTLLVEVKISTTTMKNSSEVPQKAENRATVRSSNSTARYIPKIKEIDISKRYLHSHFAALFTIAKICKQPKHPSTDEWIKKMWYIRTVEYYSAIRKNAICHLQQHGWNWRHRRRNNRNHPGEEREKQKTRMKVVRGSPTSRSSSPWPIGKWVVQQEEKVLGDVATKLATILNTRVEMAQVQ

SEQ ID NO: 31304 - protein, 44 aa, Artificial Sequence
  Synthetic polypeptide
LVLCIRFLSWNHLVCLCSLVQRSRTGITMQKYKLLDIGYRKTFP

SEQ ID NO: 31305 - protein, 57 aa, Artificial Sequence
  Synthetic polypeptide
NWDFLLFSVAQNKLYMGSGTIKVLEKFTRFFVKLEEQYLVLFTCLTLGIGGKLSVKL

SEQ ID NO: 31306 - protein, 53 aa, Artificial Sequence
  Synthetic polypeptide
QVYEKMVGRCKYKIMEKRIHRQRRFQKLFRWCQSAVFELHQKGGITFRITGNF

SEQ ID NO: 31307 - protein, 28 aa, Artificial Sequence
  Synthetic polypeptide
LDAAGTSGPQDYLQQLHPQPSQTQVPLS

SEQ ID NO: 31308 - protein, 74 aa, Artificial Sequence
  Synthetic polypeptide
RAQWLTPVISALWEAEAGGSRGQEIKTILANMVRTLMLSMISLWRILTTFLNQRSTSSKETFPGKSTFTSTGIQ

SEQ ID NO: 31309 - protein, 92 aa, Artificial Sequence
  Synthetic polypeptide
GQEFETRLANMVKPPSLLKIEKISQVWWCVPISPTTREAEARELLEPGRRRGVTAHRPRPGQLDASPTPGPGANRRPGALGPAAAALLPGAV

SEQ ID NO: 31310 - protein, 50 aa, Artificial Sequence
  Synthetic polypeptide
GCAECALLTTCLQAVCLYSGRWITPSNRVTPRRVSQSRTARTAPTASAAP

SEQ ID NO: 31311 - protein, 181 aa, Artificial Sequence
  Synthetic polypeptide
WTLRPHPDLLKQNLHFMRSSAALQALKRKKRYEKQLAQIDGTLSTIEFQREALENANTNTEVLKNMGYAAKAMKAAHDNMDIDKVDELMQDIADQQELAEEISTAISKPVGFGEEFDEDELMAELEELEQEELDKNLLEISGPETVPLPNVPSIALPSKPAKKKEEEDDDMKELENWAGSM

SEQ ID NO: 31312 - protein, 40 aa, Artificial Sequence; identical to SEQ ID NO: 19084
  Synthetic polypeptide

SEQ ID NO: 31313 - protein, 42 aa, Artificial Sequence; identical to SEQ ID NO: 19076
  Synthetic polypeptide

SEQ ID NO: 31314 - protein, 528 aa, Artificial Sequence; identical to SEQ ID NO: 19331
  Synthetic polypeptide

SEQ ID NO: 31315 - protein, 55 aa, Artificial Sequence
  Synthetic polypeptide
SQHFGRPRRADHKILALQREQPRKESSPALHILPMATRRRTHQQAPLKRKRNLAY

SEQ ID NO: 31316 - protein, 69 aa, Artificial Sequence
  Synthetic polypeptide
PGTVAHACSPSTLGGRGGWITRKGTLWTIGECLSVEETEALGQAASTVSPARSLEALMEGTEATVDTSF

SEQ ID NO: 31317 - protein, 117 aa, Artificial Sequence
  Synthetic polypeptide
VAHDLVRISMILQRLFRFSSVIRSAVSVHLRRNIGVTAVAFNKELDPIQKLFVDKIREYKSKRQTSGGPVDASSEYQQELERELFKLKQMFGNADMNTFPTFKFEDPKFEVIEKPQA

SEQ ID NO: 31318 - protein, 119 aa, Artificial Sequence
  Synthetic polypeptide
PDTSNPQFLISMILQRLFRFSSVIRSAVSVHLRRNIGVTAVAFNKELDPIQKLFVDKIREYKSKRQTSGGPVDASSEYQQELERELFKLKQMFGNADMNTFPTFKFEDPKFEVIEKPQA

SEQ ID NO: 31319 - protein, 46 aa, Artificial Sequence
  Synthetic polypeptide
GLKWSCGATLGSLRVAAAPSSASPSPGSVTAGRLARMRATKPTVQK

SEQ ID NO: 31320 - protein, 31 aa, Artificial Sequence
  Synthetic polypeptide
TGNRLTESSPLPDMGPSASCLGSAAAGIVGR

SEQ ID NO: 31321 - protein, 45 aa, Artificial Sequence
  Synthetic polypeptide
IVTFGSSEMQGHTMGFWLTKLNYLCHLSMLTDSLFLPISHCQCIL

SEQ ID NO: 31322 - protein, 56 aa, Artificial Sequence
  Synthetic polypeptide
VLMRSDGFKVGGTFPFAFSLLPPCEDMLASSSPSAMIVFPEVSQPCFLYSLWKWYL

SEQ ID NO: 31323 - protein, 47 aa, Artificial Sequence
  Synthetic polypeptide
KASSVKNEPLLDTESASTLILDFLASRTELYLMKVLEKYWLYKIEIN

SEQ ID NO: 31324 - protein, 87 aa, Artificial Sequence
  Synthetic polypeptide
AVDRILNRPHLQVLVYWLRELTTDAAIRYAVNGKFVGRLFAGLFCGDVHTVCIHQPGVVERADSPWGSTNLVGACCPTVQCCGASPK

SEQ ID NO: 31325 - protein, 21 aa, Artificial Sequence
  Synthetic polypeptide
SQIRAKRNLQAQAQPTLRPPK

SEQ ID NO: 31326 - protein, 51 aa, Artificial Sequence
  Synthetic polypeptide
TCASWGQWCGRHGLRRRRRPSQEEEAAAATYALHKPAVARARGHVPEEPLP

SEQ ID NO: 31327 - protein, 68 aa, Artificial Sequence
  Synthetic polypeptide
TCASWGQWCGRHGLRRRRRPSQEEEAAAATYALHKPAVARARGHVPEEPLPRHEHEGGDRRVDQPHRA

SEQ ID NO: 31328 - protein, 82 aa, Artificial Sequence
  Synthetic polypeptide
TCASWGQWCGRHGLRRRRRPSQEEEAAAATYALHKPAVARARGHVPEEPLPRHEHEGGDRRVDQPHRAARAGLVQEPASQVA

SEQ ID NO: 31329 - protein, 78 aa, Artificial Sequence
  Synthetic polypeptide
RCKLWQSAASLGLGFCIYKMRARRWDEENQCSLSSESFYGIGTTRWTWNPSLGRQLSLPRQPLNLRWEDITAMSVTVW

SEQ ID NO: 31330 - protein, 202 aa, Artificial Sequence
  Synthetic polypeptide
PVATSTLSGPHDTDALPGPAPGCRCHDAAGLAPRTCRIPGLCGEGTRAAPGPVEEGCGLPAEGHHAHHVVRRRLPPGGREGAAGAAHRGGHPHARASLVLLRRHPCDHDDVLHRDEGREQRHPDLGNSDPVYTACVRVPVRPGFSQENSRRNQETGAVQRKVATDNDFSRRNLYKQDLPNYLQTWCIHPWSARPACGFTISK

SEQ ID NO: 31331 - protein, 54 aa, Artificial Sequence
  Synthetic polypeptide
KKLFDLPCLIAGLKTLIPESILPHIQNEIHAQRCQEESRQTGLSRANEAPESST

SEQ ID NO: 31332 - protein, 58 aa, Artificial Sequence
  Synthetic polypeptide
HVLAPTAIAEHAGSPKPLRKREPETWQANKKFEVVSTSYRRRIKNSCRETTKRENQKR

SEQ ID NO: 31333 - protein, 19 aa, Artificial Sequence
  Synthetic polypeptide
MGLSSCKNKLRDPTDSTLR

SEQ ID NO: 31334 - protein, 160 aa, Artificial Sequence
  Synthetic polypeptide
NSEESRLHPTLQSWMAPPTCSFLPAFRLPAARPSSSCFATRGRPRTHRARGVGRVRGSCGLDQPQPGPVGVGTFPSWPLPGSLGLGPGSLAASSSPSADRVVALPARHTSAPTSPRAHGPPMLAHPAAGCTLGLCTGMGSSWGTTRTLGSGAPPARGSRT

SEQ ID NO: 31335 - protein, 56 aa, Artificial Sequence
  Synthetic polypeptide
SQLLGRLRQENHLNLGGGGCSELRSHHCTPAWATEAMYSKMQSSIKQLQLLKERMG

SEQ ID NO: 31336 - protein, 44 aa, Artificial Sequence
  Synthetic polypeptide
DRENSMPPQRYWRTGRMKVSSPESGLSNRAGSSRRTLQRICASR

SEQ ID NO: 31337 - protein, 42 aa, Artificial Sequence
  Synthetic polypeptide
DRENSMPPQRYWRTGRMKVSSPESGLSNRAGSSRRTLQRLMH

SEQ ID NO: 31338 - protein, 36 aa, Artificial Sequence
  Synthetic polypeptide
SEPRSRHCTPAWVTGDIISAFHPFLFMDILLVERPM

SEQ ID NO: 31339 - protein, 18 aa, Artificial Sequence
  Synthetic polypeptide
RAVFSLRPIPRLNSLTRP

SEQ ID NO: 31340 - protein, 26 aa, Artificial Sequence
  Synthetic polypeptide
NMYYTMASLWRWSIQLWGRFPSQAQL

SEQ ID NO: 31341 - protein, 35 aa, Artificial Sequence
  Synthetic polypeptide
NPVSTKTTTFSRDMDIFQQQISRRQLAKILICPES

SEQ ID NO: 31342 - protein, 57 aa, Artificial Sequence
  Synthetic polypeptide
QYIRLKNAGSGARLPGRLLNQSPSVVSVLVQKNKTEKRSQRNSSPVPTVATVAIHPV

SEQ ID NO: 31343 - protein, 27 aa, Artificial Sequence
  Synthetic polypeptide
GRSEAAAAARERYSVSATSVQKTILLV

SEQ ID NO: 31344 - protein, 31 aa, Artificial Sequence
  Synthetic polypeptide
FLRAPPAQTRPHPLCEMAPLYQVAAAESHPL

SEQ ID NO: 31345 - protein, 54 aa, Artificial Sequence
  Synthetic polypeptide
NTDSWAPPPGFLLQAVWGPRHGRADMGTVHCDPTKGFQKRIWNCSVRRQRQPPL

SEQ ID NO: 31346 - protein, 35 aa, Artificial Sequence
  Synthetic polypeptide
VTLVCIYVGSSVKIKAMIVQHTEISSKLSMSCHIM
